United States Patent Application Publication US 2019/0144922 A1 - sequence listing, part 4

SEQ ID NO: 2 - DNA, 4686137 bp, Escherichia coli (residues 1,562,047-3,124,092 of 4,686,137)
taacggcatgaactggaataacgccttgcgttacgacgttcacaaccttgacagcagccgctcgattgcatttggcaacacgaacaaaacggctgataccgacgtgaaacagcagtacctggagttccgcagcgaaggggcgaagactttcgaaccgagcgaaggactgaaggttacgccatatgcgggtgtaaaactgcgtcacacactggaaggtggctatcaggagcgcaatgccggagactttaacctgaatatgaacagtggcagcgaaacggcggtggacagcatcgtcgggctgaaactggactacgcaggtaaagacggctggagcgctagcgctacgctggaaggcgggccgaacctgagctacgcgaagagccagcgtacggcaagcctggcaggcgcaggcagtcagcactttaacgtcgatgacggtcagaagggcggcggcatcaatagcctgacaagcgtcggcgtgaagtacagcagcaaagaaagttcgctgaatctggatgcgtacaactggaaagaggatggcatcagcgataaaggcgtgatgctgaacttcaagaaaacgttctaatttttagcatgtgatccctaaaccgcaacgctgatacaggttgcggtttttttattgccggatgtggtacgtgacgcgttttgttttgtgtctttcaggacaatagagcaactcatccagtaatcttgtttacaccttcgcattatttatctcttttcgtttctatactgatttttcttaatccgttttattacagggcagggtgcgatgagcagcaatacatttactctcggtacaaaatccgttaaccgtcttggttatggcgcgatgcaactggcaggtcctggagtttttggccccccacgagatcgccacgtcgctataaccgtgctgcgtgaggcgctggcattgggcgtcaatcatattgataccagcgacttttatggtccgcacgtcaccaatcagattatccgcgaagcgctttatccttactctgacgacctgacaattgtcactaaaattggtgcgcggcgtggagaggacgcatcctggttgcccgcattttctccggcagagctgcaaaaagcggtgcacgataatctacgtaatctcgggctggacgtgctggatgtggttaacctgcgcgttatgatgggggatggtcatggcccagcggaaggatcgattgaggccagcctgaccgtgctggcagagatgcaacaacaaggcctggtaaaacatattggcctgagcaacgtcacaccgacgcaggttgcagaggcgcgcaagattgccgaaattgtctgtgtgcaaaacgaatacaacatcgcgcaccgtgctgatgatgcaatgattgatgctttggcccacgatggcattgcctacgtgccgttcttcccgctcgggggctttacaccgctgcaatcgtccacactttccgatgttgctgcgagcctgggtgcaacaccaatgcaggtggcgctggcgtggctgttacagcgttcaccgaatattttgctgatcccagggacgtcttcggttgcgcatttacgggagaatatggctgctgaaaaattgcatctttctgaggaagtgttgtctacgttggatggtatttcgcgagaataacgaatatacaaaagggaaagatgcatttccctttttttcttttttaatggcatggagtgcatatgttgaaggccaggaattgcggctggatacgtttactgcccctgtttatgctgagtctaccagtacaggcggaacttcgatgtgttgcaaatgcagttgatattgaatcatttttttctgcggctaccgctgaagataaacaacaagttgaacaagctatcaacagtagcgtgaatcttgtccccttcggtttatctgcatcgaactggaaagtgcatcgtggcgatttagtggtagaaggtaatatagagagtaatcaaaaattgattgttcttgggaatttgacagtcaaaggtaatatttccactttctctctttctaatccatgggttattctcggtaacgtgacggcaacgaatatagttgcggattcaccactgttaattaccggttcgataaatgcaagtggactggtatttatcgactcatattacgataatccgtctacgattaaggggagtattaatgcgcgtgggatatttatcaatgacataattgcacctgttgttgcgtcttcgacaaatagtgaattcatggtccgtgcgagtgacaaacatgacactgaaaatgtcaaaaaagcgctgatgataataaatcctgatgcatattattgggggctaattaatgatgaagatgctctgaaagaaatttttaagcgaagcaatattcgcatggcagggaatgtctgtaatcagatgaaaaaagaagcgctgtttcgccctaagccttctcctgagttagtgcaagaattgcaaatgctggatgaaggcaaagttgctgcatttgaaggacgagacattgcgacatttgatcttgccgtaatgcgaactctcccaaggcttaaaggaatttcagctaacctacgcaaacaacttattaatagcaatgatgaacaaacgattgaaagtatggcgagatatatgcctgacaatgagattctggagttgaccgatcagcaattgggttaccagcctgttgttctggggttgctcgaccgtgaaccgctctctgtcgaaataatgacgcgaatgagtcgtctacctgatggtgtcggtccgttgaatcttgcgctacgtgaaaatctccctctggatatcgtcatgactctggcgaaaagagattgggatatgatcattcaggagctttataaagatgcgtggttattgcctgaatccattattgatggctatatccgcagtgatgattcctctattcgtcaggtcggtgctggaggacaactcacctacaatcaggcaatgcagttggcgaacgattcatcaaacaatgttgtcacaagcttagcgttcaagctggcagagatgaaacaccatggtcaattgttgcggatgacgccacaagagagtgacaaagttgcaggctatttataccaaaaattcgagaatgacgatgatctaatacgtgtgttatttttagcattgccagataacttacagtttaattttgttaaaaggatggagaaaaaatccccggcctacttttgctgtcgggatatgcaggtaattcactctgacgctgctttacaacggttattgacacgtttcaacgatcctgaagggtggagtaatctggcgaaaaatcagtatctgagcacgtcgatgaaacaaaaaatttggcaacgtgctttatcgcatcggaaaaataatccgaaagcagattcagatgcatatgaaaccagcgctgatatgattttgtctgagctgattagccacggcgaagttgatgaccagatgctattaaatgccaccgccctgatacgttcggacgactgggactttttagagagtgcattaattagttgggataatttacccgctgttgttctcaaggaattacagcaaaacacgccacgcaatgatatttgggcgaagttttttctgaggcaggaaaacagttcccgtgcgcaggttgacgaagcgttacgtgtttattatgcactagaccccgatgcgttagcacaactggatgtactggcaaaacaaccggatcgtatatggtggagtacactggcgaaaagcaatctcacatttttcaagttcggcgcacttaacaaccgccacacaccgcctgcagtactggcggcagaaattgatcccgagtggtggattgtggcgatgaataatccccgttttccagttgatgtattaaaggcgaggctgaaacgtgatcctttgctggcgttagagcttgttaaccctgaactggatttagtccgccagctggcgcttaacggtaagacgcgcgcaatacgggaacaagcgatgagaaaacttgatgagttgtattgatccacaacgtaatgttttttaactatctgattaattggggataatcattcctgacagtgagtccccaataccttgatatattctgaatttttaatgaaacggcgtgttgcgatatctccgtcaggggaattgatgcaccatagcgcaaaccgaattatcaaggattgataatgacgctctaccagataaaaccgctctttcagtcgctgttaaggccgacgatgttttggctttataagcaccacgttacagcgaatcacatcactcttgctgcactggcgctttctcttcttaccggattgctgttgatgttggcggcacaacccatcctctttttgctattgcccatcgtgctttttatccgtatggcgctcaatgcgctggatggcatgttggcgcgtgagtgcaaccagcaaacacgtctgggggcgattttgaatgagactggcgatgttatttccgatattgcgctctatttaccatttttatttttaccggaaagtaacgcatcactcgtgatactcatgttattttgcaccatattgaccgagttttgcggtttactcgcgcagacgattaacggtgttcgcagttatgccggtccatttggcaaaagcgatcgcgcgttaatatttggtctgtggggtctggccgttgccatttatccacagtggatgcagtggaataatcttttatggagcattgcttcaattctgcttctctggactgcgattaatcgttgtcggagtgtgcttcttatgagcgctgaaatataatgctggaaaaatctctggcaacacttttcgcgttgttaattttagcaacgctgataaaccgttttctgctatggcggttaccggagagaaaagggggtgaggttacattacgtattcgtacctggtggggcatcgtcatttgtttttcaatggtgatttcaggtccacgctggatgacgttgacgttttttgcgctgataagttttctggcattgaaagaatattgtacgcttatatctgtacattttccgcgttggttatattggggtattcctcttaactatttgcttatcggttttaattgctttgagctgtttctgttatttatacctttggctgggtttctgatattagccaccgggcaagttttagtgggtgacccctctggttttctgcataccgtgagcgccattttttggggctggataatgaccgttttcgccttgagtcatgccgcctggttattaatgttgccaaccacaaatatccagggcggggcgttactggtgttatttcttttggcattaaccgagtcaaacgatattgcacagtatttatggggaaaatcctgcggcagaagaaaagtggtccctaaagtcagcccgggaaaaacattggaaggtctgatgggcggcgtcatcaccatcatgattgcgtcactgattatcggaccgttactgacaccgctaaatacattacaggcattattagcgggtttgttaattggtattagtggtttttgcggcgatgtcgtgatgtcagccatcaaacgagatattggtgttaaagatagcggaaaactattgccaggacatggcggactccttgacaggattgactcattaattttcaccgctccggtatttttttattttatacgctactgctgttactgaaggaaaatagagaaaatggaaaattcacgcatccctggggaacatttttttaccaccagtgataatacagcgttgttttatcggcactggcccgctttacagcccggggcgaaaaaggtcatcgtcttatttcatcgcgggcatgaacattctggtcgtctacaacatctcgttgatgaactggcgatgccagatactgctttttatgcctgggatgcccgagggcatggaaaaagttcggggccgcgtggttatagcccatctcttgcgcgttcagtgcgggatgtcgatgaatttgtccgttttgctgccagcgacagccaggttggactggaagaggtggtagtgatcgcgcaaagcgtcggcgcagtgctggttgccacatggattcatgattatgcacctgcaattcgcgggctggtgctggcttctccggcctttaaggttaaattgtatgtgccgctggcacgtcctgcgctggcgttatggcatcgtctgcgtggtctgttttttattaattcctatgtgaaaggacgctatttgacccacgatcggcaacggggggcgagtttcaataatgatccgctgatcacacgggcgattgccgttaatatcttgctcgatctctacaaaacgtctgaacgtattattagagatgcggcggcgattacgctccccacgcaacttctgatatcaggcgatgactatgtggtgcatcgccaaccgcagattgatttttatcagagattacgtagccctctgaaagagctgcatctgctgccaggcttttatcacgacacgttgggtgaagagaacagggcgctggcatttgaaaaaatgcaaagctttattagtcgtttatatgctaacaaatcgcaaaaatttgattatcagcatgaagactgcacaggaccatcagcggatcgatggcggctactttctggtggacccgtgccattatcgccggttgatttagcgtatcgctttatgcgaaaggcgatgaaattgttcgggacgcactcttcgggcctgcatctcggaatgagcaccggctttgattcaggcagttcgctggattatgtctatcaaaatcaaccgcaaggtagtaacgcattcgggcgtttagtcgacaaaatctacctgaacagtgttggctggcgcggtattcgccagcgcaaaacccatttacaaatactgattaaacaagccgttgccgatctccacgccaaaggtttagccgtccgcgtggttgacattgccgcagggcatgggcgctatgtactggatgcgctggcaaacgagcctgccgtaagcgatattttgttacgtgattacagcgagttaaatgttgcacaggggcaagagatgattgctcaacggggaatgtctgggcgggtgcgttttgaacagggcgatgcgtttaacccggaggaactcagcgcgttaactccgcggcctacgctggcgattgtctctggcctgtatgagctttttcccgaaaatgagcaggtaaaaaactcactcgcaggtcttgccaatgccatcgaaccgggcggcattctcatctacaccgggcagccgtggcaccctcaactggagatgattgccggggtgttaaccagtcataaagatggtaaaccgtgggtaatgcgcgtgcgttcgcaaggggagatggattcactcgtgcgtgatgccggatttgataaatgcacacaacggattgatgagtggggtatttttacggtttcgatggcggtgcgtcgtgataactgaacgtcggaacgtattgctacaaggcgctggctggttattgttgctggccccgtttttcttcttcacctatggatctcttaatcagttcaccgcggttcaggaccttaacagccatgatatccccagtcaggtattcggttgggaaacggcgatcccttttcttccctggactattgttccttactggagtctggatcttttatatggattttcgctgttcgtttgtagcacgacattcgaacagcgccgacttgtccaccggcttattctggcaacggtaatggcctgctgcggttttttgctctatccgctgaagtttagttttatccgtcctgaagtgagtggggtgacgggatggctattttcgcaacttgaactgtttgatctgccttataaccagtctccttcgctgcatattattctctgctggctactttggcgtcactttcgtcagcatctggctgagaggtggcgtaaagtctgcggcggatggtttttactcatcgccatttcgacgctgacgacctggcagcatcattttattgatgtcatcacagggctggcggtaggtatgttgattgactggatggtgcccgtcgaccgtcgttggaattatcagaaacctgatcaacgtcgaatcaaaatagcactgccctatgtcgtaggcgcgggctcgtgcattgtattgatggagctaatgatgatgattcagttatggtggtcagtctggttatgttggccagtattatcgctactcataattggccgtgggtacggtgggcttggcgcgataacaacagggaaagatagtcaggggaaactaccgcccgccgtttactggctgacattgccctgccgcatcgggatgtggctgtctatgcgttggttttgtcgtcgcctggagccggtgagcaaaatgactgctggtgtttatttaggggcgtttccacgacatattccggcacagaatgcggttctggacgtcacctttgaattccctcgcggacgagccacaaaagatcgactctatttttgtgtaccgatgctggatctggtggttccggaagagggggagctccgacaggccgtggcgatgctggaaacattacgcgaagagcaaggcagcgttctggtccattgtgcattgggattatcgcgcagtgcgctggtggtggcggcatggttgttatgttacggacactgtaaaaccgttaatgaagcgattagctatattcgagccagacgcccgcagattgtgctgacagacgagcacaaagcgatgctgagattatgggaaaacaggtaagtggattgagatgtggactgaatatctacagtccacatcaagaccgtgtccggttatgcagaaacaatgctgtcgatggctgcttttgcgtcagactgtgctttcgctgccatttccggaccgtatgcgatcccttcggcgaagacaaatttcacatcggtaatgccgataaagccgaggaacgtggacagatacggcgtcaccaggtccgttggtccatctttgtggatcccgccgcggctggtaataacgatggcttttttacccgttaccagaccttccggaccgttctcggtatagcggaaagtaacgcctgcgcgggcaaccaggtcaaaatagtttttcaactgagtcgagatgttgaagttatacatcggtgccgcaataacgataacgtcgtgggctttcagctcggcaatcaactcatcggaaagtgccagagcttcctgctgacgcggagtcagcggcgcatcgctcggacgcagagcgccaaccagttcgccatccagtaccggaatcggatttgcagccaggtcgcgaacggtgatttcatcagcggagtgcttttcgcgccattgttcaacaaaataatcggacaactgattagactgagagtaccctgccaggatgctggatttaagaactaataccttgctcatggtgtttccttatagatgtttgaatgggcgatgccccgttgcttgttgacactttattcacaatcctgccacagagatagcgcaataaatcgaagcctatgttcgaatttattgaacaacgcatagaaagccgcgatgtggtactctatatctatcatttaaaagaaaattaatcaggcagactactgcccactaacgttatgacagaacaacaaaaattgacctttacggccttgcagcagcggctggattcgctgatgctgcgtgacagactgcgtttttctcgccgtctgcacggcgtgaagaaggttaaaaatcctgatgcacaacaggccattttccaggagatggcgaaagagattgaccaggcggcagggaaagtcctgctgcgtgaagcggcacgaccggaaattacttatcctgacaatttaccggttagtcagaaaaaacaggacattctcgaagcgattcgtgatcaccaggtggtgatcgtcgccggggaaacgggttctggtaaaacgactcagttaccgaaaatctgtatggagctggggcgcgggattaaaggactgatcggccatacccagccgcgtcgtctggcggcaagaacagtggcgaaccgtattgcggaagagctgaaaacggagccgggcggttgcatcggttacaaagtgcgtttcagcgatcacgtaagtgataacacgatggtcaagctgatgaccgacggtatcctgctggcggagatccagcaagaccgcctgctgatgcagtacgacactatcattattgacgaagcgcacgaacgcagcctgaatatcgattttttgctcggctatttgaaagagttgctgccgcggcgtcctgacctaaaaatcattatcacttccgcgactatcgacccggaacgcttttcgcgccactttaataatgcgccgattattgaagtctccggtcggacctatccggtggaagtgcgctatcgcccgattgttgaagaagccgatgacaccgagcgcgatcagttgcaggcgatttttgacgccgtagacgaactgagtcaggaaagccatggcgacattctgatctttatgagcggcgagcgggaaatccgcgataccgccgatgcgctgaacaagctgaacttacgccataccgaaatcttgccgctttatgcgcggctttcgaacagcgaacaaaatagggtattccagtcgcacagcggacggcgcattgtgctggcgaccaacgtcgcggaaacgtcgctgaccgtaccggggattaaatacgttatcgaccccggtacagcgcgtatcagccgctacagctatcgcaccaaagtgcagcgtttgccgattgagccgatttcccaggcgtctgccaatcagcgtaaaggccgctgtggtcgtgtgtccgaagggatctgtattcgtctctattccgaagacgatttcctctcgcgcccggagtttaccgatccggagattctgcgtaccaacctggcctcggttattttgcagatgaccgcgctggggctgggcgatatcgctgcgttcccgtttgtcgaagcaccggataaacgcaatatccaggatggcgtgcgtctgctcgaagagctgggcgcgatcaccactgatgaacaggccagcgcctataaactgacgccgctcggtcgccagctctcgcagttgcctgtcgacccacgtctggcgcgtatggtgctggaagcgcaaaaacatggctgcgtgcgtgaggcgatgattatcacgtccgcgctctccattcaggatccgcgcgaacgtccgatggacaaacagcaggcatcggacgaaaaacatcgtcgcttccacgacaaagagtctgactttctcgcgtttgtgaatctgtggaattatcttggcgagcagcaaaaggcgctttcttccaacgccttccgtcgcctgtgtcgtaccgattatctcaactatctgcgcgtgcgcgaatggcaggatatctacacccagttgcgtcaggtggtgaaagaacttggcattccggttaacagcgaaccggcggagtatcgcgaaattcacattgcgttgctgaccggtttactttcccatatcggcatgaaagatgccgataaacaagaatataccggcgcacgtaacgcgcgtttctccatcttccccggttctggtttattcaaaaaaccgcctaaatgggtaatggtggcggaactggtagaaaccagccgcctgtgggggcgcattgctgcgcgtatcgacccggaatgggtggagccagttgctcagcatttgattaaacgcacctacagcgaaccgcactgggaacgggcgcagggcgcggtgatggcaacggaaaaagtcactgtttatggtttgccgattgttgccgcgcgcaaggtcaactacagccagatcgatccggcgttatgtcgtgaactctttattcgccacgcgctggtggaaggtgactggcagacgcgtcacgcattcttccgtgaaaacctgaaactacgggcggaagtagaagagctggaacacaaatcacgtcgccgcgatattctggttgatgacgaaacgttgtttgagttctacgaccagcgcatcagccacgatgtaatctccgctcgccacttcgacagctggtggaaaaaagtcagccgcgaaacgcctgatttgctcaactttgaaaaaagcatgttgatcaaagagggcgcagaaaaaatcagcaagctggattacccgaacttctggcatcagggcaatctcaagctgcgtttgagctatcagtttgagcccggcgcggatgctgacggtgtgaccgtacatattccgctgccgttacttaaccaggttgaggaaagcgggtttgaatggcagatccccggtctgcgccgcgaactggtgattgctctgattaaatcgttgccgaaaccggtacgccgtaattttgtacccgcgccaaactatgccgaagcgtttttaggccgcgtcaaaccgctggagttaccgttgctcgacagccttgagcgcgagttacggcggatgaccggcgttaccgttgaccgcgaagactggcactgggatcaggtgcccgatcacctgaaaattaccttccgcgtggtggatgacaaaaacaagaagctaaaagaagggcgctcgctacaagatctgaaagatgcgctgaaaggcaaagtgcaggaaacgctatctgcggtggcggatgacggtatcgagcagagcggcttacatatctggagttttggtcagctgccggaaagctacgaacagaagcgtggcaactacaaagtgaaggcgtggccggcgctggtggatgagcgcgacagtgtggcgatcaaactgtttgataacccgctggagcaaaagcaggcaatgtggaacggtcttcgccgtctactgctgctgaatattccatcgccaatcaaatatttacatgaaaagttaccgaacaaagccaagctgggactgtactttaacccgtatggcaaagtgctggagctgatcgacgactgtatctcctgcggtgtggataaattgatcgacgccaatggtggcccggtctggacggaagaaggctttgctgcgctgcatgaaaaagtgcgtgccgaactgaacgacacggtggtggatattgcgaagcaggtcgagcaaatccttacggcagtgttcaatatcaacaaacgtctgaaagggcgggtggatatgaccatggcgctggggctttctgacattaaagcgcagatgggcgggttggtatatcgcggttttgtcactggtaacggcttcaaacggctgggcgacacgctgcgatatttgcaggcgattgaaaaacggctggaaaaactggcggttgatccacatcgcgaccgtgcgcagatgctgaaagtcgaaaacgtccagcaggcgtggcagcaatggatcaacaaactgccgcccgcacgtcgtgaggatgaagacgtgaaagagatccgttggatgatagaagagttgcgcgttagttacttcgctcaacaacttggtacgccttatccgatttcagataagcgtattttgcaggcgatggagcagattagcggttaaccctgctatttgcctgataaagaaaaaacccggtaagcatttagcgccgggttttttattaattctaaaacggtaagggtaaaaattcaggaattcagaaaaatacaattctctgctgcaagatgaataatgtttatctacagcatttccttaaaagatatgtcaggcttgcggagtggcggttaaggacatacgatttcctcctttcagagtgctccgcttctcactattatctcacgcagtattcttaagggaacgataaggaggaaccatgaacattaccccgtttccgacgctttcgccggcaactatagatgccataaatgttatcggacagtggctggcgcaggatgatttctccggtgaggtgccgtatcaggccgattgcgtgatccttgcaggcaatgcggttatgccgactatcgatgcggcatgtaagattgcccgcgatcagcaaattcctttactgattagtggtggtatcggtcactcgacaacttttttgtatagcgccatcgcacagcatccgcactacaacactatccgcaccactggcagagcagaagcgaccatcctggcggatatcgctcatcagttctggcacattccgcatgaaaaaatctggattgaagaccagtcaacaaactgcggtgaaaacgcacgctttagcatcgcgctattgaatcaggccgtagaacgagttcatacggctatcgttgttcaggaccccaccatgcagcggcgcacgatggcgacgttccgccgtatgactggggacaatcccgatgcaccacgctggttaagttatcccggattcgttcctcagttaggaaataacgcagacagtgtaatctttattaatcagttacaaggattatggccagttgagcgttatctctcactactcactggcgagctgccgcgtttacgcgatgatagcgatggctacggtccccgcgggcgagattttatcgttcacgttgattttccggcagaagtcatccatgcatggcaaacgctgaaacatgatgcggtgctcatcgaggcgatggaaagtcgctcgttacgttaaaaattgcccgtttgtgaaccacttgtttgcaaacgggcatgactcctgacttttatttctgccttttattccttttacacttgtttttatgaagcccttcacagaattgtcctttcacgattccgtctctctgatgattgatgttaattaacaatgtattcaccgaaaacaaacatataaatcacaggagtcgcccatgtcagtacccgttcaacatcctatgtatatcgatggacagtttgttacctggcgtggagacgcatggattgatgtggtaaaccctgctacagaggctgtcatttcccgcatacccgatggtcaggccgaggatgcccgtaaggcaatcgatgcagcagaacgtgcacaaccagaatgggaagcgttgcctgctattgaacgcgccagttggttgcgcaaaatctccgccgggatccgcgaacgcgccagtgaaatcagtgcgctgattgttgaagaagggggcaagatccagcagctggctgaagtcgaagtggcttttactgccgactatatcgattacatggcggagtgggcacggcgttacgagggcgagattattcaaagcgatcgtccaggagaaaatattcttttgtttaaacgtgcgcttggtgtgactaccggcattctgccgtggaacttcccgttcttcctcattgcccgcaaaatggctcccgctcttttgaccggtaataccatcgtcattaaacctagtgaatttacgccaaacaatgcgattgcattcgccaaaatcgtcgatgaaataggccttccgcgcggcgtgtttaaccttgtactggggcgtggtgaaaccgttgggcaagaactggcgggtaacccaaaggtcgcaatggtcagtatgacaggcagcgtctctgcaggtgagaagatcatggcgactgcggcgaaaaacatcaccaaagtgtgtctggaattggggggtaaagcaccagctatcgtaatggacgatgccgatcttgaactggcagtcaaagccatcgttgattcacgcgtcattaatagtgggcaagtgtgtaactgtgcagaacgtgtttatgtacagaaaggcatttatgatcagttcgtcaatcggctgggtgaagcgatgcaggcggttcaatttggtaaccccgctgaacgcaacgacattgcgatggggccgttgattaacgccgcggcgctggaaagggtcgagcaaaaagtggcgcgcgcagtagaagaaggggcgagagtggcgttcggtggcaaagcggtagaggggaaaggatattattatccgccgacattgctgctggatgttcgccaggaaatgtcgattatgcatgaggaaacctttggcccggtgctgccagttgtcgcatttgacacgctggaagatgctatctcaatggctaatgacagtgattacggcctgacctcatcaatctatacccaaaatctgaacgtcgcgatgaaagccattaaagggctgaagtttggtgaaacttacatcaaccgtgaaaacttcgaagctatgcaaggcttccacgccggatggcgtaaatccggtattggcggcgcagatggtaaacatggcttgcatgaatatctgcagacccaggtggtttatttacagtcttaatgagtgaaagaggcggaggttttttcctccgcctgtgcgcgtcagagtttagcgaatttttcgagggtgcgaataagctgtgtgacgaagccatattcgttatcgtaccaggcgaccgttttcaccagttgtaaatcgcccacggcggtaatttccgtttgcgtggcatcaaacaccgaaccgaaatggctgccaatgatatcggaagagactatttcttcatcggtataaccaaatgactcgttattggtggttgcttgtttaagtgcgttattcacctcttcggcagtcacttttttccgagaatcgataccagttcagtgaccgaacctgttttcaccggcacgcgttgcgcatgacctttcagtttgccgctcagttccgggatcaccagaccaatggcttttgccgcccccgtagtgtggggaatgatattttctgccgctgcgcgtgaagcacgtaaatctttaccacgcgggccatccaccagtgactgggtgccagtataggcatgaatggtcgtcatcgtgccgacttctatcccgaaactgtcatgcaaggctttggccatcggcgcaagacagttagtggtgcatgacgccacggaaacaatggtgtcgttgccatccagagtgtcgtcattgacgttataaacgatagttttcatttcaccggcaggggcggaaatcaacaccttcttcgcaccagcatcaagatgcgcctgcgatttctcggcggaggtataaaagccagtacattcgacaatgatttctgcacctttcgctttccacggaatatttttagcctctttttcggcgtaaaccgcgatacttttcccatcaacgataagtgaatcttccgtaaaatcaacgctccaggggaatggtccgtagtttgaatcatgtttcagcaggtaggcgagaatttatggggaagtgagatcattaatagcgacaacgtctatgttgcttttgacttcaagtaatcgacccaacaccagtcgaccgatacgaccaaaaccgttaataccaactttactcatggttttctcctgtcaggaacgttcggatgaaaattgatcctttccaagcttagaccaggatggcgggatgggcaatctccattctcacagtgaaacgtaacgtactgaaaacgggtgaacaatatttaatgaaattttgagaaaagcccgttatgttaacggaaaattatgttaaagcaggaaatgttatggaaaataaatattcaaggttacaaatcagcattcactggctggtctttttactggttatcgcagcgtattgcgcaatggagtttcgtggtttcttcccacgtagcgatcggccactcatcaacatgattcatgtttcctgtggcatctcaattctcgtgctgatggtcgttcgtcttttgttaaggctgaaatacccaaccccgccgattatacctaagccaaaaccgatgatgacgggactggcgcatttgggacatttggtgatttatctcctgtttattgcgctgccagtgattggtttggtgatgatgtataaccggggcaacccgtggtttgcgtttggtttgacgatgccttacgcttcagaggccaatttcgaacgggtagatagcttaaagtcgtggcatgaaacgctggcgaatctgggatattttgtcatcgggttgcacgctgcggctgcactggcacaccactatttctggaaggacaacacacttctacgcatgatgccgcgtaaacgttcctgaaggatatttaaagaaaacgcctgtactaaaaccgacccgtggtacaggcgaagaatacgggtctacatcggaagcgcctattatatttatttgtatgataaataaaaccataatccttgcccatacgtccatctggcttatttttaatcaattcacccgatctttgatctcatcaacggtatcaaaataaaccagcgtataacgttcaaatcgaacataagattcgataaaccatggaggttatatgaaaaaactggcacttattttgtttatgggaacgcttgtttccttttatgccgatgccgggcgcaaaccctgttctggttcgaaaggggggatctcacactgtacggcaggcggcaaatttgtctgtaatgatggttctattagtgcatcgaaaaaaacatgcactaactgaagtgtaaaaggggtgccatgagaaaatgaatctgctagtcaaatgcgcggggaaaatccccgcgcttgcccttacctggacgtgcaggccatgagcgcagcaacctccttatcaccgtcccggaaccgcagttcgtagagcgtttgtcgggtcaggagtgtgaatgtcagaatcgtaatgcagataatgagcagacacaccaccagagggttgtgcttcatagcctttctccttgccggatggcgggtaagaggctaagatctgaattgctaggttcattcgttggcctcggttgatagaaatatcggtcggggccttcgtctttctgattcccggttagcctgaaaacagaaagtctcaggcacccgcaggcatcctatgaggtttccttagggacgaaaataatcacttcacgaaattgcgtgctgttttccagaatttttcgtcattcgggttagccagtttagccattcgttactctcttcattccaatagcattaattttctatgcaataattgttgtaaaaatgtgacgcaaagaggtttttggtcataagtaattaccgtcaagtgccgatgactttctatcaggagtaaacctggacgagagacaacggtaatgaatacaactccctcacagcgattaggttttttgcatcacatcaggttggttccgttatttgcctgcattctaggcggtatcttagttctattcgcattaagttcagccctggctggctatttcctctggcaggccgatcgcgatcagcgtgatgttactgcggagattgagattcggaccgggttagcgaacagttcagattttttgcgttcagcccggatcaatatgattcaggccggggctgcgagtcgtattgcggaaatggaagcaatgaagcgaaatattgcgcaagccgaatcggagattaaacagtcgcagcaaggttatcgtgcttatcagaatcgaccggtgaaaacacctgctgatgaagccctcgacactgaattaaatcaacgctttcaggcttatatcacgggtatgcaacctatgttgaaatatgccaaaaatggcatgtttgaagcgattatcaatcatgaaagtgagcagatccgaccgctggataatgcttataccgatattttgaacaaagccgttaagatacgtagcaccagagccaaccaactggcggaactggcccatcagcgcacccgcctgggtgggatgttcatgattggcgcgtttgtgcttgccctggtcatgacgctgataacatttatggtgctacgtcggatcgtcattcgtccactgcaacatgccgcacaacggattgaaaaaatcgccagtggcgatctgacgatgaatgatgaaccggcgggtcgtaatgaaatcggtcgcttaagtcgtcatttacagcaaatgcagcattcactggggatgacagtagggactgttcgacagggcgcggaagagatttatcgtggcaccagcgaaatttcagctggcaatgcggacctgtcatctcgcaccgaagaacaagcggcggctatcgaacaaactgccgccagcatggagcaactcactgcgacggtgaaacagaatgcggataacgcgcatcatgccagcaaactggcgcaagaggcttctattaaagccagcgatggcgggcagacggtttccggtgtagtaaaaacgatgggcgctatctccacgagttcgaagaaaatttctgagatcaccgccgtcatcaacagtattgctttccagacgaatattctggcactgaatgctgccgttgaagccgcgcgagcgggtgagcaagggcgtggatttgccgttgtcgccagcgaagtacggacactcgcaagtcgcagcgctcaggcggcgaaagagattgaaggcttgatcagtgaatcagtcaggttaattgacctggggtcggatgaggtggcaacggccgggaaaaccatgagcactattgttgatgccgtcgcgagtgtcacacatatcatgcaggaaatcgccgccgcctcggatgaacaaagtagaggcataacgcaggttagccaggcgatttctgaaatggataaggtgacgcaacagaatgcttctctggtagaagaggcctcagcggcggcggtgtcccttgaagaacaggcggcacgattaactgaggcggtggatgtattccgtctgcacaaacattctgtgtcggcagaacctcgcggagcgggtgaaccagttagtttcgctacggtgtgaaaatgttcaaggagggatcgacagatcccttcacctttcagaacggcattgattttcgaatagcgttaatcatcaactggcaaccagaagagaacgtcgcatctacgcgggtcagtattccaatcggttcgcctgcaccatgtcccggaacaggcagggccaccagcgtggcatgacgcaggtcgtcttttacagcgccagaagggacaaaccacacgtaatcgtattcaaccgtaagttgacgagatagcgaagcagacagcgtttcgatacaacccgaaggaattttacagccctggctctgcactaatgcatctgaatgctggcgtggcgcagtgccttctggtgatacaacgaccggccattccagcacccggcttagcgttacgttctcctgaagtagcgggtgattagggcggacaaccagcttcaacgattcaagaaacagcagttcgtaattaagcccggtcatcagttcaggatctgacatccgaccaatgccgatatcgatttccccggtttttaaacccgccagaatcatagggttactcattgtcgcaacttgcaaggtcgtctctttttgttgctgatgaaactgacctataaccgaaggtaatatccccagtgccgcagtaggtagtgcaccaaccctgacgacatcattattaagaccttctttacgatgaagcgaccgtccggcagtgttgatggcgtcaagaactctgactgcatgcgttaaaaattgttcgccgggtaaggtaagttgcgccccctgacgaccacgctcaaacaagcgagcgccagtcagctgctccagttcattcaatgtcttagagagcgcaggttgactcaaattaagggtttcagccgcgcgccccaaagttccttgttgtgcgacagctacgaatgtatgaaggtggcgcaaacggatgcgctgactaaacagactatttttttccataagcgatgttaaaaacgaagcggtgtcgctgacaagtgaagttgtttgattatgataacttgattgcaaaatattattaacaattaaagcaattatgttacagcaaaatggataatattgatgttttcgcggcgagatcacagtttgtaaattcttcccgcaagagtgaatgcggttacctacactccagattactgaccactggaggcagacactatggcgaacagcatcacggcggatgagattcgggaacagttttcgcaggcaatgtcagccatgtaccagcaagaagttccgcaatatggcacgctgctggaactggtagctgatgtgaatctggctgtgctggaaaacaatcctcaactgcacgaaaaaatggtaaatgcagacgagctggcgcgactgaatgttgaacgtcatggggcgattcgcgttgggactgcacaagagcttgctactcttcggcggatgtttgccattatggggatgtacccggtgagctattacgatctctcgcaggcaggggtgccggtacattcgacagcatttcggcccattgatgatgcttctctggcgcgtaatcccttccgcgtttttacctccttactccgccttgagcttatcgagaacgaaattttgcgccagaaagcggcggagattctgcgtcagcgcgatatcttcaccccacgttgtcgacaactgttagaggaatatgagcagcagggcggttttaacgaaacacaggcacaggagtttgtgcaggaagccctggaaacgtttcgctggcaccagtcagcaacggtagatgaagaaacctatcgcgcattgcacaacgaacatcggttgattgctgatgtggtctgttttcctggatgccatatcaaccacctgacgccacgtacgctggatattgaccgggtgcagtcgatgatgcctgaatgcggaattgaacccaaaattctcatcgaggggccgccgcgccgcgaggtaccgattttactacgccagaccagctttaaagcactggaagagacggtgttgtttgcggggcagaaacagggcacgcataccgcgcgctttggtgaaattgagcagcgtggcgtggcattaacgccgaaagggcgacaactgtatgatgatcttctgcgtaacgctggaaccgggcaggataatctcactcaccaaatgcatttacaggaaaccttccgcacttttcctgacagtgagtttttaatgcgtcagcaagggttggcatggttccggtaccgtctgacgccttcgggtgaggcgcatcgtcaggcgattcatcctggagacgatccacagcccttaattgaacgtggttgggtagtggcgcaacccatcacctatgaagatttcttgcccgttagcgcggcggggatcttccagtcaaatctgggtaatgaaacgcagacacgcagtcacggtaatgccagtcgcgaagcatttgagcaggcgttgggttgtccggttttggatgagttccagctttaccaggaagcggaagaacgcagtaaacgtcgctgtggtttgctttaaaatctgaccatccgcctttgcaaaaatttgcctgattttacaaacgaatcaggctcatcccatcgacataaaaaaaatgccgatttatgcatattctctcagttcaacaattggattattaataaatattgtctagagtgagcggtcataaataagcactttcttgccgctgaaaacgaccagcgcgggaccattcacaacaccagaaggactcactttcaggtatggatcgtagacgatttattaaaggttcaatggctatggccgccgtgtgcggtaccagcggcattgcttctcttttttctcaggcggcattcgcggcagattctgatattgccgacgggcaaacccagcgttttgacttctccattctacagtcaatggcgcacgacttagcgcaaacagcgtggcgtggtgcgcctcgtccgttacctgacacgctggcgacaatgacgccgcaggcttataacagtattcaatacgacgccgaaaaatcgctctggcataacgttgagaaccgtcaactggacgctcagttcttccatatgggaatgggattccgtcgccgcgttcgtatgttttctgtagatccagcaacacatctggcgcgtgaaattcactttcgcccggagttgttcaaatacaacgatgcaggtgttgatacaaaacaattagaagggcaaagcgatctcggctttgccggttttcgcgtgtttaaagcccccgaactggcgcgccgtgatgtagtatcatttctcggcgcgagttatttccgcgccgttgatgatacatatcaatacggtttgtcggcccgcggcctggcgatcgacacttacaccgacagtaaagaagagttccccgactttaccgccttctggtttgatacggtaaaaccgggggcaactacctttaccgtttatgcgttgctcgatagcgccagcattactggtgcctataagttcactatccattgtgagaaaagtcaggtgattatggatgtggaaaatcacctgtatgcgcgcaaagacattaaacagctgggcattgcgccgatgaccagtatgttcagctgcggtactaatgaacgtcggatgtgcgatacaattcatccgcaaattcatgactctgatcgtctgtccatgtggcggggcaacggcgagtggatttgccgtccgctgaataatccgcaaaaattgcagttcaatgcttacaccgacaacaacccgaaagggtttggtttattgcaactggatcgtgacttctcccattatcaggacattatgggctggtataacaaacgcccaagtctgtgggtggaaccgcgtaacaagtggggtaagggcaccatcggcctgatggaaatcccaacaacgggcgaaacgctggataacattgtctgcttctggcagccagaaaaagctgtaaaagcaggtgatgagtttgcattccagtatcgtctgtactggagtgcgcaaccgcctgttcattgcccattagcgcgcgttatggcgacgcgtaccggcatgggcggtttctcggaaggttgggcgccaggtgaacactatcccgaaaaatgggcgcgtcgttttgccgtcgatttcgttggtggtgatctgaaagctgccgcgccaaaaggcattgagccggtgattacgctttccagtggggaagcgaagcaaatcgaaattctctatattgaacccatcgatggttatcgtattcagtttgactggtatccgacttcggactccactgatccggtcgatatgcggatgtatctacgttgtcagggggacgctatcagtgaaacatggctgtatcagtatttcccgccagcgccggataaacgtcagtatgttgacgaccgcgtgatgagttaatcgttttttcttcggcaccttcttcgggaggtgccgtctggttaaacacgatcccgctcgcatttttccctaagttaaatgagtaatctgatggtgtgtatttcagatacaccttgtcagccactaacagggagtgcgtatgtttccagaataccgagatttaatatcccgtctgaaaaacgaaaatcctcgctttatgtccttgttcgataaacacaataaacttgatcatgaaattgccagaaaggaaggttccgacggtcgagggtacaatgcggaagtggtccgcatgaaaaaacaaaagctacagttaaaagatgagatgctcaaaatcctgcagcaggagagcgtcaaagaggtgtaaactttcctaagccgccagccaggcggcttttttaacaactgcatggattgactggagataagatgactgaaacgataaaagtaagcgaatcacttgaattacatgctgttgcagaaaatcacgtcaaacctctttatcagttaatctgtaaaaataaaacctggttacagcagtcgctaaactggccgcagtttgttcaaagtgaagaggacacgcgaaaaacggtgcagggtaatgtgatgttgcatcaacgcggctatgccaaaatgttcatgattttcaaagaagatgaacttatcggcgttatctcgtttaatcgtattgaaccactgaataaaaccgctgaaataggctactggctggacgaatctcatcaggggcaggggatcatttctcaggcgctgcaggcattgattcatcattacgcccagtctggtgaacttagacgcttcgtgatcaaatgtcgggtggacaatccgcaaagcaaccaggtcgctttgcgcaatggttttatccttgaaggttgcctgaaacaggctgagttcctgaatgatgcctatgatgatgtgaacttatacgcgcgtattatcgattcacaataaccctgccagcggcgttcgcgtaatgcgctcctcgccgttaatgacttttggaccacggacatgaaccgtgtcgccatcaaaggcttcaacgacggcgtggtcggttaactccacatggttttcaattatcaccgcacctgtaatacggctctcaccttgtatgacaacgtgctcgtcgagcagaatcggtccgccacgtaccacggcatttccgccaaccaagacatgatgttttaacacacaattaccttccacaatggcatattccgccacctgcgaactgtaatgaatcgtcggaatggcatcttcttctatgccagctttcacctgcgcgtgaccgtagactttagcgcaatcgcatagccagacattgttctcttcattaccttcaatactggcaaaatcaaaaacttcggcgcgatgttcaataaaagcataccggacgacggcatcgccataaatttgtgcctggtggacaatacgcgaggcgctaacccttgcgcgatcataaatttggagcaggagttgatggtcgggcgttaagccttgtgcggcgacgatcatagaatgttgatcaattaaggcgtgaccaaatattctacattgcccgtaaactaatgagtcatgaatggtgacgctgtcacttatatatgcaccctggctgatttcactattatcgatccagacgttatccgttgcgtaaacctctccccacagcacgctggtgccggtgatacgcgtattaccggaaatcaccgctccgccgaacgcaatagcattctggtcgtaaatccagcaatttccttcttgtgctaacaccgtttcgcgatcgatccagccgccagcggttcctgctatcacatcgttaaaatcgctaatggcgataatctgccgtaataacacattttttttagtgccatcttcctgataactaaaggctcgctgttcttcacttagacgatatttgcgcatagcgttttcccacaggtgacttactataaccgtagcaaattctgcggctctggctatgctcgagaaaattccataaaatgcatttcaaatatactttataaattaaacaaaatgagtaagaagatgcagagcgataaagtgctcaatttgccggcaggctactttggtattgtgttggggacgatagggatgggatttgcctggcgctatgccagccaggtttggcaggtcagccactggttaggggatgggctggtgattctggcgatgatcatctggggattattgactagcgcatttattgcccgactcatacgctttccgcatagcgtgctggcggaagttcgccatccagtgctgagcagttttgtgagtttgtttccggcaacgacgatgctggtggcgattggttttgttccgtggtttcgcccactggcggtgtgcctgttcagttttggtgtcgtggttcagttggcttatgccgcctggcaaactgcgggattatggcgcggatctcaccctgaagaagctaccacgcctggactgtatctgccgacagttgccaacaactttatcagcgcaatggcctgtggtgcgttgggctacaccgacgccggtctggtgtttttaggcgcaggcgttttctcatggctaagccttgaaccggtgatcttgcagcgtctgcgcagttcgggagaattacccacggcactgcggacatcactcggcattcagctcgctcctgcgctggtggcttgtagtgcctggctgagcgtcaacggcggcgagggtgacacgctggcgaaaatgcttttcggttatggactgctgcaactgctgtttatgctacgtctgatgccatggtatctctcccagccatttaatgcttcattctggagtttctcgttcggcgtatctgcactggcaaccaccggtttgcatctggggagtggcagcgataatggatttttccatacgctggcggtgccgctgtttatctttaccaattttattattgcaatactgctcatccgtacttttgcgcttctgatgcagggaaaattgttagtcagaaccgagcgcgccgttttaatgaaagcagaggacaaagaatgatcattcgtgacgaaaactattttactgataaatatgaattaacccgcacacactctgaagtactggaagcggtgaaagtggttaaaccgggtaaaacgctggatctgggctgtggcaatggtcgtaacagtctttacctggcagccaatggttatgatgttgacgcatgggataaaaatgccatgagtatcgccaacgtcgagcgcattaaatccattgaaaatctggataatttacacacccgagtcgttgatctgaataacctcacatttgatagacagtacgattttattctttcgactgtggtgctgatgttccttgaggctaaaaccatccccgggttgattgccaatatgcaacgttgcactaaacctggtggttacaacctgattgtggcggcgatggataccgctgattatccatgtaccgtcggcttcccgtttgccttcaaagagggagaattacgtcgatattacgaaggctgggagagggtgaaatacaatgaagacgtcggcgagctgcaccgcaccgacgccaacggtaatcgtattaaactgcgtttcgccacgatgctggcacgtaaaaaatgacccggtaagcacaaaacgcgtgaaaattccccacgctgagatgatttactgttcttcttttcggtaagcatattttttatcgaagggatgtgaaattaatcacagtagtcgaagtttttagcagcttaacttactgaaatttaagtactgatgattgacttagcccctttttcggcattgactatgtcgtctgaaaaggggctgaaaaatttattttcaccaacactttttttgccacaacacgaagcggcgctttttgctataacttagaaagtaatataatcatctcaggaaactattcatgcgtaccacatcatttgcgaaagttgcagctttatgcggcttattggctctgtctggttgtgcatctaaaatcacccagccagataaatattctggttttttaaacaattactctgatttaaaagaaacaacctcggctacaggtaaacctgttttacgttgggtagacccgagttttgatcaaagcaaatatgacagcatcgtctggaacccaatcacttattatccggtaccgaaaccgtcgacccaggtagggcagaaagttctggataaaattttgaactataccaacaccgaaatgaaagaagcgatagcgcagcgtaaaccactggttaccaccgctgggccgcgtagtctgattttccgtggggccattaccggtgtagataccagcaaagaagggctgcaattctatgaagtggttcctgttgcattagtggttgcggggacgcaaatggctacaggccaccgtaccatggatactcgcctctattttgaaggtgagctgattgatgcagcgactaataaaccggttatcaaagtcgttcgtcagggcgaaggtaaagacctgaataacgaaagtacgccaatggctttcgaaaatattaaacaagttattgatgacatggcgaccgatgccaccatgtttgacgttaacaaaaagtagttccagacgcgccatcgttagatggcgctttttatccggtgcgccgtaaaaccccatccttcagggcggggatataaggcgcggttttccacctgaccaggtgtttgctgttgttcaatgtattggcggatgacggatattggcgcacctccgcagctactggcaaaatagccaggactccacaaaacgcctttgtagtaatacctgaatgcaatatctggtcgatctcgtcgcagtcacctacccgatacgcctttgaggctgtttaccagactggatatcgccagtttgggaggatagttaattaacaaatggacgtgatctggttcgccatccatttcaaccagttcagcttcaaaatcagcacatacatttgaaaagtaagtgcgtagtttttctgtcgcgtcatggtcaaaaatctggcgtcggtatctggtgacaaagagcaggtgaacatgcatcaggaaaacacaatgccttccacgccggatatcggtttcttttttcacagaccaaagtatcatttgacctgtgaaacgattacaggcatttaaattccagttaagacccggtggtcaacaggagtgtgaaatgaggcgcttcgcaggcgcatgtcgtttcgttttcaatcgtgctctggcacgtcagaatgagaatcatgaggccggtaataaatacatcccttacgggaaaatggcttcctggctggttgagtggaaaaatgccactgaaacgcaatggcttaaagattctccctcacagccattgcaacagtcactgaaagaccttgagcgggcttacaaaaacttcttccggaagcgggctgcttttccccgattcaaaaagcggggacagaatgatgcattccgctacccgcagggcgttaagctcgatcaggaaaacagccgtatttttctgccgaaactgggctggatgcgctaccggaacagccgtcaggtcacgggtgttgtgaaaaatgtcactgtcagccagtcctgcggtaagtggtacatcagtattcagacagaaagtgaagtatcaactccggttcacccttcagcatcaatggtcgggctggatgctggcgtggctaaactcgccacgctgtcagatggcacagtctttgagcctgtaaacagttttcagaaaaaccagaagaagctggcgagacttcagcgacagttaagccgcaaggtcaaattcagcaacaactggcaaaagcagaaacgcaaaatacagcgactgcattcctgtatcgcaaatatccgcagggactaccttcacaaagtcacaacggccgtcagcaaaaaccacgcaatgatagtcattgaggatttgaaggtcagcaacatgtcaaagtcagcagcgggtacggtcagccagccggggcgcaatgtccgggcaaaatcaggtttaaaccgttcgatactggatcagggctggtatgaaatgcgccgccagcttgcgtataagcagctctggcgtggcggtcaggtgcttgctgttccgccagcgtatacaagccagcgttgcgcgtactgtggtcatacagcgaaagagaaccgcctgtcacaaagtaaattcagatgccaggtatgtggatatacagcgaacgccgatgtaaatggcgctcgcaacattttagcggcggggcacgccgttcttgcctgtggagagatggtgcagtcaggccgcccgttgaagcaggaacccaccgaaatgattcaggcgacagcctgaacgtagcagggatccacgtccttcagggcgtggaggatgtcaatatcggtttctgtcagcgattaaattcaacaccacgtaacaaacgcctccggcaattaatccccaaaacgcagaaccaatcccgaccagcgtcaatccacttgccgttaccagaaatgccaccaccgccgcgtctcgctcacgctcattatgcagcgcctgatacaaactgccgccgatggtacttaacagcgccagacctgccagcatctggatccaacttacgggcagggcagccatcatcccggtaatggcactaccaaacagacctgcgagcaaatagaaaatgcctgcaacggcagcggccagccaacgttgatctttatccggatgcgcttccgggctttggcaaatagccgcggtgattgccgcaataccgacggaataaacgccgaaaggggaaaaaaccagtgccagcaatccagtaaatacaattaatggcgaaacaggagccgaatatccagctgctttcattgctgcgatacccggtgcgttttgcgatgccatcgtcaccagaaaaagggggagtgcaacgctcaggctgtgagcaaacgaaaaatcaggggtaatataagtggggagaacgggtttaaagacaacatcagttgtgacaacgtcaccttgcgcgatgacgatcacgatcccaataatcatcgcggcaattaccgcatagcgcggcgcaacggccttggttgccagccataccagcaacatacttccacacaacgtaaattgaccgtccagactggcaaacgcctgtaaaccaaagcgtaataaaatcccggcaagcattgccgccgcaagcgagtgcggaataatgcgcatcagacgagcaaagagtcccgttatgccgcagaggactattagcgcgttggtgacaataaaaacgccgatggcttcgttaagtgttagtccctgcaatccggtgaccaacaaagccgcgccaggcgttgaccatgcggtgagaacaggtacgcgataccataatgtcagagtcagcgtactgacgcccattgccagccccagcgccgtcatccagccagagatttgtgcagtggtggctccggcgacaatcgctgcttgccagattattgccgctgaactggcgtagccaattaataccgccagaaaccccgccagtagcgtgggtggaggaatagaaaacagacgcatagtcacctcgtgcgttatagcgtacaggcaccgtagcatttgtccgttataacgcacaagtgataaacttccgttttgccggaggagtcgcatggaaaatctcgctcgctttttatccaccacacttaaacaactacgccagcagcgcggctggagtctttcgcgactggcagaagcgacgggcgtttctaaagcaatgttagggcagattgagcgtaatgagtccagtccgacggtcgcgacattatggaaaattgccaccgggttgaacgtaccattttcaacatttatttctccgccgcagtccgctacgccttcagtttatgatccacaacagcaggcgatggtgatcacttcgctgtttccttatgatccacaactctgctttgaacacttctcgattcagatggcatctggtgcaataagcgaatcgacgccccatgagaagggggtaatcgaacatgtcgtcgtcattgatggacaacttgatctgtgcgttgatggggaatggcagacccttaattgtggggaaggcgttcgatttgctgcagacgtcacgcatatctatcgtaatggtggggagcaaaccgtacattttcattccctcatccattacccgcgcagttaagcgggaaaactatttcgcaacgtcgcgcttgtggctaaaatagccgccatttttcagctactggataagaatgtgaccgtatcttctcatcgacttgaactgttaagcccggcacgcgatgccgccattgcccgcgaagctattttgcacggtgccgatgctgtttatatcggcggccctggttttggtgcccgtcataatgccagtaatagcttgaaagatattgccgagctggtgccgtttgcccatcgttatggtgcaaaaattttcgtcacgcttaacaccattttgcatgatgatgagctggaacccgcgcaacggctgattactgacctctaccagaccggtgtcgatgcgctgattgttcaggatatggggattctggaacttgatattccgccgattgaactgcacgccagtacgcagtgcgacattcgtacagttgaaaaagcgaagttcctctctgatgttggcttcacgcagattgtgctggcgcgagagctgaatcttgatcagatccgcgcgattcaccaggctacggacgcgaccattgaattctttattcatggggcactgtgcgtggcctattcgggtcagtgctacatttctcatgcgcaaacagggcgtagcgccaaccgtggcgattgctcgcaggcgtgccgtttgccatacacattgaaagacgatcaggggcgggtggtttcctatgaaaaacatctgctgtcgatgaaagataacgatcagactgccaacctcggcgcgctgattgatgctggtgtacgctccttcaagattgaagggcgttacaaagatatgagctacgtgaagaatatcaccgcccattatcgccagatgcttgatgccattattgaagaacgtggcgatctggcgcgcgcttcatcaggtcgtactgaacatttctttgttccatcgacggaaaagactttccaccgtggtagcacagattattttgtgaatgcccgtaaaggcgatattggcgcgttcgattcgccgaaatttatcggcctgccggtaggcgaagtagtgaaagtggcgaaagatcatctcgatgttgccgttaccgagccactggcaaatggcgatggcctgaacgtgttgattaaacgtgaagtcgtcggttttcgtgccaatacggtcgagaaaaccggagaaaatcagtaccgcgtctggcccaatgaaatgccagcagatttgcacaaaattcgtccacatcacccactaaaccgtaatcttgatcataactggcagcaggcactgacaaaaacctccagcgaacgtcgggtggcggtagacattgaactgggcggctggcaggaacaactgattctgaccctcaccagtgaagagggtgtcagcatcacgcatacgctggacgggcagttcgacgaagccaataacgccgaaaaagcaatgaacaatctgaaggatggtctggcaaaactggggcaaaccctctattacgcccgcgatgtgcaaattaatttgccgggggcgctgtttgtaccaaacagtctgttaaaccagttccgccgtgaagctgctgacatgctggatgctgcgcgtcttgccagttaccagcgcggcagccgtaaaccggttgctgatcctgcgccggtttatccgcaaacgcatctgagtttcctcgcgaacgtatacaaccagaaagcgcgtgaattttatcatcgctatggtgtgcagctgattgacgcggcgtatgaagcacatgaagagaagggcgaagtcccggtgatgatcaccaagcattgtctgcgctttgcctttaatctgtgcccgaaacaggcgaaaggcaatatcaaaagctggaaggcgacgccaatgcaactggttaacggcgatgaagtattaacgctaaagtttgattgccgcccatgcgagatgcacgtcattggcaaaatcaaaaatcacatactgaaaatgccgttaccgggaagcgtagtggcatccgtaagtccggatgagctgctgaaaacattgccgaagcgaaaagggtaaaacgccagttttctggttactcacaacttattgaatctgcatgatattgcctgccgggtaaggcgttacgccgcatccggcatcaaatgactcaacgttgtcccgcttctggtttgcgcgatttttgccagtaaaaatgctcgcgcaaaccttccgccgactcttccgccacagcacgcaattcatcgctgtccgcttcatgacgcagctgatgatccacattctttacccacacaaattcatgtcctttgtgccctgccatgagttgtcctgaaaacagagcacacgttaataagacaaccgataacgccttcgtaaacatcctgccacctttttcttaccttttgccgctatgatgccgatcgtttcttgaggttattattcagttttgcaaattagcgcaaagaaattctggaatcttccttcctgattttgcattgcattctgccgttgcggcgatttagtgctattttcgagcaaattacacacggaggtaaacactaatgtttactttgttgatatactcagcggcagggaggcgatgtgaaacaaagcgagttcagacgttggctcgaatctcagggcgtcgatgtagcgaatggcagcaaccatttgaaactcaggtttcatgggaggcgcagtgtcatgccgcgtcacccctgcgatgagattaaagaaccattgcgtaaagcaatcctgaaacaactcggtttgagttaatcgccaattaaaaaggttaatgacatgcgagagacagtcgaaattatgcgttatcccgtcactcttacacccgcgccggaaggcggttatatggtttcttttgtggatatccctgaagcgttgacccagggcgaaactgtcgctgaagcgatggaagcggcaaaagatgctttactgaccgcatttgatttttattttgaagataacgagcttatccctttaccttcgccattaaatagtcacgatcactttattgaagtacctttgagcgtcgcctctaaggtattgctgttaaatgcttttttacagtcagaaatcactcagcaagagttagccaggcgaattggcaaacctaaacaggagattactcgcctatttaacttgcatcatgcgacaaaaatcgacgccgtccagctcgcggcaaaggcgcttggcaaagagttatcgctggtgatggtttaattacagttaacgaaaagttgtcatttttaacaactgatatagactgccgaatcatctgcacataattacgattcgataatgaaaaaataccagcagcttgcagaacaattacgcgagcagattgcgtcgggtatctggcaacccggcgatcgtttgccttcgttgcgtgaccaggtggcgctttcaggcatgagctttatgactgtcagccatgcctatcagttgctcgaaagtcagggatatattatcgcacgaccgcagtcgggttattacgttgcgccacaggcaataaaaatgccgaaagcgccagtcattccagtcactcgagatgaagcagtcgatatcaacacttatatttttgatatgttgcaggccagtcgcgatccgtcggtcgttccgtttgcctcggcctttcccgacccgcgacttttccccctccaacaactaaaccgctcgctggcgcaggtaagcaaaaccgccacagcgatgagcgtgattgaaaacttaccgccaggaaacgcagaactgcgtcaggctattgctcgtcgctatgccttacagggcatcaccatttctcctgatgaaattgtcattactgccggggcgttagaggcattaaacctcagtttgcaagcggtaactgaaccgggcgattgggtgatagtagagaatccttgtttctacggtgcgttgcaggcgctggagcggctacggctgaaggcgttatcggtggcgacggatgttaaagaagggatagatcttcaggcgctggaactggcgttgcaggagtatccggtgaaagcgtgctggctgatgactaatagccagaatccactcggatttaccttaacgccgcaaaaaaaagcacaactggtggcgttgctcaatcagtacaacgtaacgctgattgaagatgacgtttacagcgaactttattttggacgggaaaaaccgctgcctgcgaaagcgtgggatcgccacgatggcgttttgcattgctcttcgttttcgaaatgtctggtgcctggttttcgtattggttgggtcgccgccggaaaacatgcacgtaaaattcaacgcttgcagttgatgagtacgctttccaccagctcaccgatgcaacttgcgctggtggattacctttccacgcgccgatacgacgcccatcttcgtcgcctgcgtcgccagcttgcggaacgtaaacaacgtgcctggcaggcactgctgcgttatctgcctgcggaagtgaaaattcatcataatgacagtggttactttctctggttggagctccccgagccgttagatgccggcgaattaagcctggcggcactgacgcatcatatcagtattgcgccgggtaaaatgttttctaccggtgaaaactggtcacgttttttccgttttaataccgcgtggcagtggggagagcgtgaagaacaggcggtaaaacaattaggcaaacttattcaagaacggctgtaatagcgtttaatttaattcctcttagattgggtaatatgaatttcgaatagcagtcatatttcctaactccttgactatactccagaagataaccttacagacggcataatgcgcggtagctcacaacctgaataaattttctcaggggcgaaggtgtgcctgcaagccgccgtctatggttaaacaaggagatatttttacggcacggcggctgaacaattaattacgacaggagtaagaccttatgagcaagacatttgcccgcagcagcctgtgtgcgctcagcatgacaataatgaccgctcacgccgccgaaccgcctaccaatttagataaaccggaagggcgactggatattatcgcctggccgggatacatcgaacgcggacaaactgataaacaatacgactgggtaacgcagttcgaaaaagagacaggctgcgcggtgaatgtgaaaaccgccgcgacttccgatgaaatggtcagtctgatgaccaaagggggttacgatctggttacggcatccggcgatgcctcgctgcgtttgattatgggtaaacgcgtgcagccgattaataccgcattgattcccaactggaaaacgctcgatccgcgcgtggttaaaggcgactggtttaatgttggcggcaaagtttacggcacaccttaccaatgggggccgaacctgctgatgtacaacactaaaaccttcccgacgccgccggatagctggcaagtggtttttgttgagcaaaatctgccggacggcaagagcaataaaggccgcgttcaggcttatgatggccctatctatattgcggacgctgcgttgttcgttaaagccactcagccgcagttgggcatcagcgatccgtatcaactcaccgaagaacagtaccaggcggtgctgaaagtgctgcgcgctcaacacagtttgatccatcgctactggcatgacactaccgtgcaaatgagcgatttcaaaaacgagggtgtggttgcttccagtgcctggccctatcaggccaacgccctgaaagccgaaggccagcctgttgctaccgttttcccgaaggagggtgttaccggttgggctgataccaccatgctgcatagcgaagcgaaacatccggtttgcgcctacaaatggatgaactggtcattaacgccaaaagtgcagggcgatgtggcggcctggtttggctcgttaccggtagtgccggaagggtgtaaagccagtccgttattaggcgaaaaaggttgtgaaaccaacggttttaactatttcgacaaaatcgccttctggaaaacgcctatagcagaagggggcaagtttgttccctacagtcgctggacgcaggattacattgccattatgggcggtcgctaacttcgctggggtgctttatgacgtacgcagtggagtttgacaacgtctcgcggttgtacggtgacgtgcgcgcagtagatggcgtcagtattgcgataaaagatggtgagttcttctctatgctggggccgtccggctccggcaaaaccacctgcctgcgcctgattgctggcttcgaacagctttccggcggggctatctctatctttggtaaacccgccagcaatctgccaccgtgggagcgggacgtgaatactgtctttcaggactacgcgctatttccgcatatgtcgattcttgacaatgtcgcctatgggctgatggtcaaaggcgtgaataaaaagcagcggcacgcaatggcgcaagaggcgctggagaaagtggcgttggggtttgtacatcaacgtaaaccgtcacaactttctggtggtcagcgccagcgggttgctatcgccagagcattggtgaatgaaccgcgcgtattgctgttggatgaaccgctcggcgcactggatctcaaattgcgtgagcagatgcagctggaactgaaaaaactgcaacagtctctcggtatcacttttatcttcgttacccacgatcagggcgaagcgttatcgatgtccgatcgtgtggcggttttcaataatggacgcattgagcaggtcgattccccgcgcgatctctatatgcgcccgcgcacgccgtttgttgccgggttcgttggtacatcgaatgtttttgatggactgatggcagagaaactttgtggcatgacgggaagcttcgccctgcgaccggaacatatccgcctcaacacccctggtgaactgcaggccaatggcacgatccaggcggtgcaatatcagggcgcggcaactcgttttgaactgaaattgaacggcggtgaaaaactgcttgtgagtcaggccaatatgacaggcgaagaactgcctgccacgctcacgcccggacaacaggtgatggtttcctggtcgcgtgatgtgatggtgccgctggttgaggagaggtgaatggcgatgaatgtattgcaatcaccttcacgtccaggtctgggtaaggtgtccggtttcttctggcataatccggggctggggctgtttttactgctgcttggcccgctaatgtggtttggcattgtctatttcggctcgctgctgacactgttatggcagggattttatacttttgacgatttcaccatgtcggtaacgccggaactgacgctggcgaatatccgtgcgctgtttaatccggcgaattacgacatcattctccgcacgctgactatggctgtggcagtcactatcgccagcgccattctggcttttccaatggcgtggtatatggcgcgctataccagcgggaaaatgaaagcgtttttttatattgcggtaatgttgccgatgtgggcgagctacattgttaaagcctatgcctggacgttattgctggcaaaagatggcgtggctcagtggtttttacaacatcttgggctggaaccactgctgactgcgttccttacattacctgcggtgggcggaaatacgctgtcaacttccgggctggggcgctttctggtgtttctctatatctggttgccgttcatgatcctgcccgttcaggcggcgcttgagcgtttgccgccgtcattgttgcaggcgtcggctgatctcggcgcacgtccacgacaaacctttcgctatgtggtgctgccgctggcaatcccgggtattgccgctggctctatctttaccttctcactcacactgggcgattttatcgtcccgcagctggttggtcctccaggatattttatcggcaatatggtttattcccagcagggggcgattggcaatatgccgatggcggcggcattcaccctggtgccgattattctcatcgcactgtacctggcgttcgtgaaacgtctgggagcgttcgatgcactctgaacgcgcaccgtttttcctcaaactggcggcctggggcggcgttgttttcctacattttcccatcctgataatcgccgcctatgcgtttaacactgaagatgcggcgtttagttttccaccgcagggcctgacgctgcgctggtttagcgtggcagcacagcgtagtgatattcttgatgccgtgacactgtcacttaaagtggcggcgctggcgacattaattgcgctggtgttagggacgctggcagctgccgcgctgtggcgacgagactttttcggcaaaaacgccatttcgctgttactgctgctgcccattgcgctgccgggcattgtcactggtctggcgttattaaccgcctttaaaaccatcaatctggagccgggatttttcaccatcgtggtcggtcatgcgactttttgtgtagttgtggtgtttaacaatgtcatcgcccgttttcgccgcacctcctggagtctggttgaggcgtcaatggatcttggggccaatggctggcaaaccttccgctacgtagtgttgccgaatctcagttcggcgttactggcaggaggaatgctggcgtttgccttgtcgttcgatgaaatcatcgttacgacctttacggcaggtcatgaacgaacgttaccgttgtggttgctcaatcagcttgggcgaccgcgtgatgtaccggtaactaacgtggtggcactgctggttatgttggtaacaaccttgccgatcctgggggcctggtggctaacccgcgaaggcgacaatggtcaataaccactgatacaggaatatgctatgcaacataagttactgattaacggagaactggttagcggcgaaggggaaaaacagcctgtctataatccggcaacgggggacgttttactggaaattgccgaggcatccgcagagcaggtcgatgctgctgtgcgcgcggcagatgcagcatttgccgaatgggggcaaaccacgccgaaagtgcgtgcggaatgtctgctgaaactggctgatgttatcgaagaaaatggtcaggtttttgccgaactggagtcccgtaattgtggcaaaccgctgcatagtgcgttcaatgatgaaatcccggcgattgtcgatgtttttcgctttttcgcgggtgcggcgcgctgtctgaatggtctggcggcaggtgaatatcttgaaggtcatacttcgatgatccgtcgcgatccgttgggggtcgtggcttctatcgcaccgtggaattatccgctgatgatggccgcgtggaaacttgctccggcgctggcggcagggaactgcgtagtgcttaaaccatcagaaattaccccgctgaccgcgttgaagttggcagagctggcgaaagatatcttcccggcaggcgtgattaacatactgtttggcagaggcaaaacggtgggtgatccgctgaccggtcatcccaaagtgcggatggtgtcgctgacgggctctatcgccaccggcgagcacatcatcagccataccgcgtcgtccattaagcgtactcatatggaacttggtggcaaagcgccagtgattgtttttgatgatgcggatattgaagcagtggtcgaaggtgtacgtacatttggctattacaatgctggacaggattgtactgcggcttgtcggatctacgcgcaaaaaggcatttacgatacgctggtggaaaaactgggtgctgcggtggcaacgttaaaatctggtgcgccagatgacgagtctacggagcttggacctttaagctcgctggcgcatctcgaacgcgtcggcaaggcagtagaagaggcgaaagcgacagggcacatcaaagtgatcactggcggtgaaaagcgcaagggtaatggctattactatgcgccgacgctgctggctggcgcattacaggacgatgccatcgtgcaaaaagaggtatttggtccagtagtgagtgttacgcccttcgacaacgaagaacaggtggtgaactgggcgaatgacagccagtacggacttgcatcttcggtatggacgaaagatgtgggcagggcgcatcgcgtcagcgcacggctgcaatatggttgtacctgggtcaatacccatttcatgctggtaagtgaaatgccgcacggtgggcagaaactttctggttacggcaaggatatgtcactttatgggctggaggattacaccgtcgtccgccacgtcatggttaaacattaaggataatattgcagatcgtaagagtatgagatgatcttgcgtactgtcagagcactgatttctctgacagtacgtgctgcgtgcaaaatcactacatcaaataaaccagccaaatctcatagagataagagtaaacaaaccaacagcagcaaagaaatttatcagtactacagttctactggaaacattcatttttgccaccttttatcattgcccctatgtgtatagtacgggttaagaaaatccgcaataatactcattctgaagatggataagggcaagttgctgtttgatgattttttctcaaactggtgaaaaaacttgatgcacgtcaaaaaatgacgcatatttgcgcgcgttttattcatctggctggacgcccgtacatgtctctctatcaacacatgcttgttttttatgcggttatggcagcaatcgcatttcttatcacctggtttctttctcacgataagaaacgcatccgtttcttaagcgcctttctggtgggggcaacatggccgatgagtttcccggtggcgctgttgttttcactgttttaaatcttactcactggcttgacggcaccacgcagacttatatcatttggatgaatcgataaatttcacaagtggctaaggagaaagtatgtcgcatctggatgaagtcatcgcgcgcgtggatgccgcgattgaagagagcgtcattgcccatatgaacgaattattaatcgccctgagcgatgacgcggagttaagtcgggaagatcgctacacccagcagcaacgtctgcgcacagcgatcgcccatcacggtcgcaagcataaagaagatatggaagcgcgccacgaacagttaaccaaaggcggcaccatcctctgattaaaatgagcgtctggctaccaaccaggcgccaaccacaagtaaaattgcgccacaaattgggccgaacaacgcccgtagtggtacgccatgactgcggaagatatccagcatcagaccgccaatcagctgactggcgaccagtacagcaatagttgtcgccgctcccacattctgatatccgctgatactggcgaagacaaaaaacgatcccagcaagccaggtataagtgtccaccagcgcacgctggacaccagttcgccaaaccccgccatgccttgtttaaaccataaaatagaaacaaagagcacaatccccaccagtgagttcagcaacatggcgatgagaatggtagaggaggtctgggtgatgcgcaccatcagcgtgttctggacaaccagaccaattccggcggcaatcaaaaaagcaagggtgagcgactgattcatccaatcgcgtccggttcagtgcgctcgtcgagttgcaactgcataaatgtcagatccagccaacgaccaaatttagtgcctacctgcggcatttgcgcggtgacgacaaatcccagcgactggtggagatgcagcgaggcctgattttgcgattcgatcccggcgaccatgacatgcttcccgcaatcccgcgcttcatcaatcaatcggcttaacaatttacgccccagacctttgccctgatgatcgggatggacataaaccgaatgttccacggtatggcgaaaaccatcgaaactacgccagtcgccaaacgaggcatatcccgtcactacgccgttttcctcgctcaccagcactggataacctgctaaagtccgcgcttcaaaccaggcaatgcggttatcagcatccaccgtttggtcattccagatagccgccgtatacaacacggcgtggttataaatttccgcaatggcagcacagtcggctttgcgggcaaaacggatggacatgtctggcctcaataaaataatgatgatgatgttatcaatactatcgaaaacagcccgaagcaacggattcctcgatgaaattattgcgtgttgcagaggggatgtgacggctgcaaacaaaaccaatcccgtgagcctgctactattgatggattcatgccaaaagcacaggagagcattatggggcaacaaaagcagcgtaatcgacgttgggttctggcctcgcgtccacatggcgcacctgttccggagaatttccgtcttgaagaagatgatgtcgccacaccgggtgaaggacaggtgttactgcgcacagtttatttgtccctggacccgtatatgcgtggacgtatgagcgatgagccatcttattcaccgcctgttgatattggcggcgtgatggtcggcggtacggtgagccgtgtcgtggagtcgaatcatcctgattatcagtctggcgactgggtgctgggctacagtggatggcaagactatgacatatccagtggtgatgatctggtgaaacttggcgatcatccgcaaaatccatcgtggtcgctgggtgtgctagggatgccaggctttaccgcttatatgggcctactggatatcggtcagcctaaagagggcgaaacgttggtggtagctgcggcgacaggaccagtgggggcgacggtggggcaaatcggcaaacttaaaggttgcagagtggtgggggtagccggtggcgcggaaaaatgccgccatgctaccgaggtgttaggcttcgatgtttgtcttgatcaccacgcggatgattttgccgaacaactggcgaaagcgtgcccaaaaggtattgatatctattatgaaaacgtgggcggtaaggtattcgatgcggtgctaccgttacttaatacatctgcgcgcattcccgtctgcggattagtgagcagctataacgctacagagctaccacccggtccggatcgtttacctctgttgatggctacagtgctgaaaaaacgtattcgcttgcaaggttttattatcgctcaggattatggtcaccgcatccatgagtttcagagggagatggggcaatgggtgaaagaggataaaatccactaccgcgaagaaattactgacggtttagagaatgcgccacagacgtttatcggcctgctgaagggtaaaaacttcggcaaagtggtgatccgcgtggcgggtgatgattaaagtttcaacggcggcgtaagccgccataaaaatccaggcaaaaagcttattttcagctttaattaactaaccacatcattgttctgctgctaataacaacaaaggtgagtggtttatgattattcactttaatacaccaggtgaattccttctgccatgcaggcagggttggacagaaaacacgcgaaggaattaaaatgcctggaacgggaaaaatgaaacatgtcagtttgactctgcaggttgagaacgacctgaaacatcagcttagtattggcgcattaaaacctggcgcacgcctgattactaaaaatctggcggagcaattaggtatgagtattacacctgtgcgtgaagcattattacgtctggtttcggtgaatgcgctttctgtcgcacctgcacaagcatttacagttccggaagtggggaaacgtcaattagacgaaatcaatcggatccgctacgaactggaattaatggcagttgctctggctgttgaaaacctcaccccgcaagaccttgcggaactccaggaattgctcgagaaattacagcaggcgcaagaaaagggcgacatggaacaaatcattaatgtaaacaggctatttcgcttagcgatttatcatcgctcaaatatgcccatcctgtgtgagatgattgagcaactgtgggtcaggatggggcctggtttacattatctctatgaagcgattaatccagcggaattacgggagcatatagaaaactatcatctgttactcgctgcgttaaaagcaaaagacaaagagggatgcagacattgtcttgctgaaattatgcaacaaaatattgctattttataccagcaatacaatcgttaaagtaaatgcccggcaaataccgggcatcaaggtaattactcaaatctccacgcaatattcatgccgacaccataatttcgtccgggcgaaggttcgtaatatcgcccgtttgactcattgacaatgacagaaccaacgtattctttatcgaataaattatcgacacgaccaaataaatccacagttaaattgtggtaattgtatttatacccggtgaataagccgacgagagtataagacggcgcttttgccgtattttcatcatctgccataatatcgcccatataacgcgcttccgtgcctgcataccaaccatcttccggtacataacctatcgacgcaaagcccatattacgggcgatccctggcatccgattaccgttacaatcctgttcattgcaaacattgctgcgataggtcgcatcaagccaggtccaggacgcgtttacgcgaaaatctcctgcgaaacgttgatcccatgccagttcagcgccttgacgacgggtctttccggcatttttgtaagtcgtacgcccaccgctactgctatcgacaacaatttcatcatcagtgtcggtctgaaacaatgcgagactaagcagcccatcaccaatacgcgttttactgccgatctcaattgtatcgttggtggatggttttaaacctaagttcataccgctttgcccatcagcacgataagacagctcattaatcgtcggcgtttcaaaacctcgcccggctgccagatagatattccaggcatcggtcattgcatattttaacgaaccggcaggtagccatttatgataactggcatcaccgctgtcatcgccgttacccggagtaacgtaatggtcgttggaatcaaaccacacggagctgtagcgcacgccagcatccagcgacagtttttcgctcagctgccactgcgtctgtaaatagggatcgatgttccacatcagattgcgttcgtcgcgacgcaactcacctttttgcccgtactccggcatgccgctattcaggcggaagttattgtagcccttgcggttttcactcatgttttcgtagttcaggccggtagtgaacgtgaccggaacgcccagttcaccacggtgtgtccagcggctgtctattccctggtaatggcgttgcagggtaatcacgccgcccgcatgtgacgggttaagttgtggtgccatgggtattgactggtactgggtcgtttctcgctctccggcatacatcatcacactcatatcatcccgcgaactcaggctacgctcatagcgcaacccagcctgagtttgcttgatggtttttcgcgtgtcgtactgttctgcacgaggcgcttgttgtggattagccttccattctgctttggttagcccacctgggtcatctgctttgatatccacactattgaaaatcagacttaatttgctggcttcatcaatgcgtacgcccagtttggcattggctaaatttttctgtgcgccactatggtcacgatagccgtgggtcgtaaaacgcgtggttgagacggtgtaatcgacatcgccaggctgtgtgccgtctcccgttgcgcccgttgctttcagcccatagcgccagctgccaaaactgccgtagtaactactggcttcaatggttggtggctgttgtccggtctgggtggtgacattcattaccccaccagacgcgttgccatacagggcagagaaggggccacgcagcacttccacattttgcacactgcttaaatcgatgttggatgtttgcccttgcccgtcgggcatggtggcgggaataccgtccacatacaggcgaataccgcgaataccgtaagtggagcgggagccaaatccgcgaatcgacagctgtaaatcttgcgcatagttctgccggttttgtacctgcaaaccaggcacgccggtcagtgattcggacaagttaatgcgcggtgttgccaggcgcatctcctcgccatccaccacgcttactgctgctggggtatccagttctgaaaccacctgcggtgcggcactgacaatcatagtctgttcatcagcggcaaaaacaacgggggaaaggacaagcagtgcgggcaaaacggtctgtcggacggaaaaaatcttcatgaaaaaagccaggttaagaatgggaaaacgccgtcatggtaatgaaattgtaaatttatggaaaatgaaacggcacaatacgttaagtaattgagaaaattgtagtcgtaacggcaagaaatgctccacatttgagaaaataatgattaccattcccatttataacaagagcgtaacgatgattacgcttagcgaagcattgtgaagcagcaaaaatatcggttcatcaaagggagtcgtcatgcatttacgtcatctgttttcatcgcgcctgcgtggttcattactgttaggttcattgcttgttgtttcatcattcagtacgcaggccgcagaagaaatgctgcgtaaagcggtaggtaaaggtgcctacgaaatggcttatagccagcaagaaaacgcgctgtggctcgccacttcgcaaagccgcaaactggataaaggtggcgtggtttatcgtcttgatccggtcactctggaagtgacgcaggcgatccataacgatctcaagccgtttggtgccaccatcaataacacgactcagacgttgtggtttggtaacaccgtaaacagcgcggtcacggcgatagatgccaaaacgggcgaagtgaaaggccgtctggtgctggatgatcgtaagcgcacggaagaggtgcgcccgctgcaaccgcgtgagctggtagctgacgatgccacgaacaccgtttacatcagtggtattggtaaagagagcgtgatttgggtcgttgatggcgggaatatcaaactgaaaaccgccatccagaacaccggtaaaatgagtaccggtctggcgctggatagcgaaggcaaacgtctttacaccactaacgctgacggcgaattgattaccatcgacaccgccgacaataaaatcctcagccgtaaaaagctgctggatgacggcaaagagcacttctttatcaacattagccttgataccgccaggcagcgtgcatttatcaccgattctaaagccgcagaagtgttagtggtcgatacccgtaatggcaatattctggcgaaggttgcggcaccggaatcactggctgtgctgtttaaccccgcgcgtaatgaagcctacgtaacgcatcgtcaggcaggtaaagtcagtgtgattgacgcgaaaagctataaagtggtgaaaacgttcgatacgccgactcatccaaacagcctggcgctgtctgccgatggcaaaacgctgtatgtcagtgtgaaacaaaaatccactaaacagcaggaagctacccagccagacgatgtgattcgtattgcgctgtaatagatatggcgagggtgaaaacggtgagacttgcctgccttttatcacggcgtatccggcactttcgtcagtaatctgaatttgcccggcacgtagccgggcaattttgcaattaactcgccgtttcaggcttaaacacaatttcctgtttttcttcatcttcctcgacgactggcgcagtgctgtgaatttcagcaacgcgtttgcgcacaccaaaccagcctataaccagcaaaataccgataatcggcagcgccgcgatagtataagtcccgttcgggtaatcgaacgccatcagcacaaggacactcagtaaaaacagtaatgtcagccaggaagtgaagggcgcgccaggcagtttaaaactgacatccgctgctttgccttctttaatcgctttacgcaggcgcatctggcacacgatgataaacgcccatgaagcgatgattcccagcgacgcgaagttcaacacaatctcaaatacgcgcgacggcaccagatagttgaggaatacgccgacgacatacacaactagtgtcgccagaatcccggcatacggcacatgctgacgactcattttcgccataaaactcggtgcggaaccgcccatcgccattgagcgcagaatacgtccggtgcagtacagacctgaattcaggctggagagggcagcggtcagcaccacaatgttcataatgctgccgatatatggcacacccagtttagagaaaaacgtcacgaacggactttgccccgcctgatacgcgctccacggcaataacataaccagcaacaccacggagccgacgtaaaacaggccaatacgccaaatcacactgttaatggctttaggcaccatggtctgcggatctttacattctccggcagctgtacccaccatttcaatggaggcaaaagcaaacactacgccctgaatcaacaccagcgcaggcagcaaaccgtgggggaagaagccgccattatcggtgattaaatgaaagccagtggtgttgccatccagcggctgaccactaccgaggaacactgtacccacgaccaaaaaggtcacaatggcgagcactttaataagcgcaaaccagaactccatctccgcaaaccatttcacaccgatcatattcatggtgccaacgatggtaagtgcagcgagcgcaaagacccactgcggcacgccgccaaacgcaccccagtaatgcatatacagagcgacggcggtaatatcaacaatccccgtcatcgcccagttgatgaagtacatccagccagcaacataagcggctttctcacccaaaaactcacgggcataagaaacaaaactgccactggaagggcggtgtagcaccagctcacccaatgcacgcagaataaaaaacgaaaacaagccacaaattaaataaaccagtgccagtgcgggccccgccatttgcagtcgggctcctgcacctaaaaacaagccggtgccaatcgcgccgccaatggcgatcatctgcacctggcgattgcccatcgctttgtgatacccctcttcgtgggcattaagccagcggcgtttcgcggcgtgttgatctgaagtgtcggtgtcgtgtttactcattgctctccctgattgctttaatgaaaaagtcatataagttgccatgaacaatgtttattcatcctggcgatgatagttatcaccattattctttatgggtataaaactatcggcgcagcatcctacccgttatcgataaacgatgcaaaacatccccttacaatcctgaaggggattaatacaactgacgaaaaaatgacaaatccttttgctggttaacctgtgtactgtcctacacttaatctttaaaagattgtgaggggcatatgattaaggtgtatggcgtacccggatggggctctacaatcagtgagctgatgctaacactggctgatattccttatcagttcgttgatgtcagtggttttgaccacgagggagcttcacgcgagttattgaaaaccctgaacccgttgtgtcaggttccgacactggcattggaaaatgacgagattatgacggagacagcggcgattgcattgatggttctcgatcgtcgcccggaccttgcgccaccggttgggcgcgccgaacgtcagctgtttcaacggctattggtctggctggttgctaatgtctatccaacattcactttcgccgattaccctgagcgttgggctcctgacgcacctgaacagttaaagaagaatgttattgaatatcgaaaatcgctttatatctggttgaattcgcagctcactgctgaaccttatgcgtttggtgagcaactaacgctggtggactgttatctttgcactatgcgcacatgggggcctgggcatgaatggtttcaggataatgccacgaatatcagtgcgattgctgatgctgtatgtcagttaccgaaattacaagaagtattaaaaaggaatgaaattatttgagtgggataccagaagattatgttatttattattcagtaactttatccacaatgatgggcgtaattaattaaattcatggtatgttttttaatttatatcactctccttttcattcagcgtgtctatttcatttcctctgaaaagaaactaactattcacatcgtgcagatgtttcagttgttatcacaggcattctataatctcaaaatgtttttaatgatggatatgctcggagttggagatgcaattaatattaatacaaataaaaatatccggcaggtatgctaaaaggataaatggcgttctctgtatttattcgcaattatctgtaggacaaatatggagagcttgatgagtcagagctaaaacagcaattgattaataaacatgttgatttattcaagaaaatggatgtattttaaatgttgattcttaatataacctaatcaatagattatcaagtgagagctacacattattggaggggcaggggaaaacaccattttgggaacaatgcatcaggtactcttaccactgaagcaagatcatccggcaccaggtggtggtgcagtgctttggaaatggtcccctcgggggagttgtcattattttctatgctatttgcttattatattcatcaggtgaatttaataaattcctaatttgaaatatccactattaagctagtgtttaacgacgttaagatggcaatgtgcagatcatgttatcagggtggggcggtagcgtatattccttatacaaaccatcattcatttcaatgattgttattgaattatttattgttgtgaataaaaagacattatgaatattggtttgactttgcatatcaggttttttattactcgctgtaatgtacgagcctgtcgtgaataacgtcgagaacccatccgttgcgtttgtgattattttgttgactaaacagacacccgtttctctgaagtaaaatcccagactaaatcatcacataaccatgacatttttctgatattccccggtaacgccagatgtcgactcgcttaaccaccctcagccataccagtgaaggccaccgcgtgtcggtccactacggctatgacgataaaggccgcctgaccggcgaacgccagacggtggagaacccggagacgggggaactgctgtggcaccatgagaccggacatgcgtacaacgaacaggggctggcaaaccgcgtcacgccggacagtctgccgccggtggagtggctgacctacggcagcggctatcttgcgggcatgaagctgggcgggacgccgctgctggagttcacgcgcgaccgcctgcaccgtgagacggtgcgcagcttcggcagcatggcaggcagtaatgccgcatataaactgaccagcacatacacccccgcaggccagttacagagccagcacctgaacagcctggtgtatgaccgtgactacgggtggaatgacaacggcgacctggtgcgcatcagcggcccgcgacagacgcgggaatacggctacagcgccacgggcaggctggagagtgtgcgcaccctcgcaccagacctggacatccgcatcccgtatgccacggacccggcgggcaaccggctgccggacccggagctgcacccggacagtacactcacagtgtggccggataaccgcatcgcggaggatgcgcactatgtctaccgccacgatgaatacggcaggctgacggagaagacggaccgcatcccggcgggtgtgatacggacggacgacgagcggacccaccactaccactacgacagccagcaccgcctggtgttctacacgcggatacagcatggcgagccactggtcgagagccgctacctctacgacccgctgggacggcgaatggcaaaacgggtctggcggcgggagcgtgacctgacggggtggatgtcgctgtcgcgtaaaccggaggtgacgtggtatggctgggacggagacaggctgacgacggtgcagactgacaccacacgtatccagacggtatacgagccgggaagcttcacgccgctcatccgggtcgagacagagaacggcgagcgggaaaaagcgcagcggcgcagcctggcagagacgctccagcaggaagggagtgagaacggccacggcgtggtgttcccggctgaactggtgcggctgctggacaggctggaggaagaaatccgggcagaccgcgtgagcagtgaaagccgggcgtggcttgcgcagtgcgggctgacggtggagcaactggccagacaggtggagccggaatacacaccggcgcgaaaagttcatttttaccactgcgaccaccggggcctgccgctggcgctcatcagcgaagacggcaatacggcgtggcgcggggagtatgatgaatggggcaaccagcttaatgaggagaacccgcatcacctgcaccagccgtaccgtctgccagggcagcagcatgatgaggagtcggggctgtactataaccgtcaccggcactacgatccgttgcaggggcggtatatcaccccggacccgattgggttgagaggtggatggaatatgtatcagtatccgttgaatcccatacaagtgatagacccaatggggttagatgcgattgagaatatgacatcaggtggactaatttatgccgtatctggtgtacctggattgattgctgcaaacagcattactaacagtgcttaccagttcggttatgatatggatgctattgttggcggagctcataatggggccgccgatgcaatgagacattgttacttgatgtgtcgaatgactaagacatttggatcaacaatagctgacgtgataggtaaaaatcatgaggcggcaggggatagacaaggtcagccagctaaagaaagaatcatggatcttaaaaataacactgtcggtattgcttgtggcgatttttctgccaaatgtagcgatgcatgtattgaaaaatataacactgggcaactcttcgggttagatggtataaaagcagataatccaataaaagcaaagcaagggagttcagatgcttcaaattattagaggcaaacttgtcatttttttaattaccctttgtttatttgttgtttaccttgggtttgataacaattcaaattctgacatcgtattttatggacataaaacaccaaagagcgttgagatatatctttctgaaaaaaatattatttataaaataattaatgaccaaaaaattagtagagggaatggtcattttataagtataatggttaataattacaggacgcactgtggagtggttgatataaatcttaattttttcaatgatattctttatagcgtgcgattaaaaaacattagtaaactggagaatatggagttctgcgctacaaaacaacgggtgtattttagtgataaaaacaagaaggctagttataaaataattaattatggagactattatgatgttgattattatgataacaatttgaaaaatgaagtttttgactggattggtaaatggtcataatgaacaacaccagaaagagaaaaatataaaatacatacagaaagacatgagagcaagggacggggcagggcaagatcatgaaaattgtgatgtaaatcacgattttcatctttgctttaacgcctacaggtgatcaaaatttaacctttggaataactaaaaagataaaaaaggacgccaggtgagtattcaaagtttgcttgattatatttcagtgacccctgatatacgacaacaaggaaaggttaaacataaattatctgctattttgtttctcaccgtatgtgcagtaattgcaggtgccgatgagtggcaggaaattgaagattttggacatgaaagacttgaatggctaaagaaatatggtgattttgataatggcattccggtcgatgacaccattgcacgcgttgtgagtaacattgacagtttggcctttgaaaagatgtttattgaatggatgcaggagtgccatgaaatcactgatggtgaaattatagcaatagatggaaagaccataagaggctcctttgataagggaaaaagaaaaggagcaatccatatggtgagtgcattctcgaacgaaaatggtgttgtactggggcaggtgaaaacggaagccaaaagtaatgagattacagccattccagagttgcttaacctactgtatttaaagaaaaatttgataaccattgatgctatgggctgtcagaaagatatcgcttcgaagatcaaagataaaaaagcagattatcttctggcagtaaaaggcaatcaggggaaattacatcatgcattcgaggaaaaatttcctgtaaatgtgttttctaattataaaggcgattcgtttagtacgcaggagataagtcatggaagaaaagaaacacgtttgcatattgtcagtaacgtaacgcctgaacttttgtgattttgaattcgaatggaagggattaaaaaagctttgtgtagcattgtcattcaggcagaagaaagaagataaatcagcagaaggtgtaagcatccgatattatatttcatcaaaggatatggatgctaaagaatttgcacatgctatcagagcgcactggctgatcgagcacagtcttcattgggtgttagatgtaaaaatgaatgaagatgccagccggataagaagaggaaacgcagcctaaataatatctggaataaagaagatggcactgaatttattaagagattgcaaagacattaagggtgaagaggaaaagaaagaaggctgcgttaaacacagggaaagatcatcagaagttcactttttgtactaaacaattcgcattttatgtttaaaaattgagatattccttattacctaaagctgttttttattgcttacacatgatcaaatactccttacataattaaggagaacaaaatggaacttaaaaaattgatgggacatatttctattatccccgattacagacaagcctggaaaatggaacataagttatcggatattctactgttgactatttgtgccgttatttctggtgcagaaggctgggaagatatagaggattttggggaaacacatcccgattttttgaagcaatatggtgattttgaaaatggtattcctgttcacgacaccattgccagagttgtatcctgtatcagtcctgcaaaatttcacgagtgctttattaactggatgcgtgactgccattcttcagatgataaagacgtcattgcaattgatggaaaaacgctccggcattcttatgataagagtcgccgcaggggagcgattcatgtcattagtgcgttctcaacaatgcacagtctggtcatcggacagatcaagacggatgagaaatctaatgagattacagctatcccagaacttcttaacatgctggatattaaaggaaaaatcatcacaactgatgcgatgggttgccagaaagatattgcagagaagatacaaaaacagggaggtgattatttattcgcggtaaaaggaaaccaggggcggctaaataaagcctttgaggaaaaatttccgctgaaagaattaaataatccagcgcatgacagttacgcaatgagtgaaaagagtcacggcagagaagaaatccgtcttcatattgtttgcgatgtccctgatgaacttattgatttcacgtttgaatggaaagggctgaagaaattatgcgtggcagtctcctttcggtccataatagcagaacaaaagaaagagctcgaaatgacggtcagatattatatcagttctgctgatttaaccgcagagaagttcgccacagcaatccgaaaccactggcatgtggagaataagctgcactggcgtctggacgtggtaatgaatgaagacgactgcaaaataagaagaggaaatgcagcagaattattttcagggatacggcacattgctattaatattttgacgaatgataaggtattcaaggcagggttaagacgtaagatgcgaaaagcagccatggacagaaactacctggcgtcagtccttacggggagcgggctttcgtaatcttgccctgggcattattgtcgtataaacgctttaccggacacatgacattcacaatgtgtgttaattttactgacatctttcaaaaggagcgtaatcatgccgcacatcgacattaaatgttttccgcgtgaactggacgaacaacaaaaagcagcacttgctgcagatattaccgacgttattattcgtcatctgaacagtaaagacagttcgataagcattgctctacagcagattcaaccagaatcttggcaagctatctgggatgccgaaatcgcgccccaaatggaggctttgataaagaaacctggttatagcatgaatgcttaacccgccgtaacacgcttgccgctggtaacaaacgtcccagcacctaaatgatgcaacgtattgagcttatcatcatcaaactgccagcggccttcgacaaatacccgtgcgtctgccgctgctgatactacttcgccaaacagcgtgtcgtattcttcttgcgcagaagtcgcaggtagcaatcgacactccatccacgccagacatttttcctcgaccagaggcaaaccaaataccgggcctctcacaaccggaatgccatagcaattaaatttatcttcatcacgccccgacacacttcccaccgcccacgtccagttagttgctgcaacgcccgggataacgatgccaaatttaccgttatgttcaatcaactccctggtccatgtcgatttatctaccacaatcgccacgcgtggaggttcaaactccaccggcattgaccaggctgcagccataatgttacgccgctgggattgctcatcgaaactggtgatcaagaccgttgggccatgatttaacagacggctggcatggtgtaattctatggggatgaatcggctcatggtatcgcctcgcgaagaaggtttttttaagcgtagtccgtaacgcaataagtaacgaaattaacgggattggcgatttgcgaacgtgatgcatgtccgcgatcgcacaaaatagccggtgcggcgtctattccaggttataagttgagaaaaccactaagggaaacgcctgatgacgcccattctgaatcactattttgcccgtattaactggtcgggagctgctgcggtcaatattgatacgcttcgtgcattgcacctgaaacacaattgcaccattccgtttgaaaacctcgacgttttgctgccgagggaaatacagcttgataatcaatcgccggaagagaaactggtgatagcccgtcgtggcggttactgttttgagcagaatggcgtgtttgagcgggtgttacgcgagctggggtttaacgttcgcagcttgttagggcgcgtagtgttatcaaatccgccagcattaccgccgcgcacccatcgtttgctgttggtggaactggaagaggaaaaatggattgctgatgtcggtttcggtgggcagacgctaaccgcgccgattcgtttagtttccgatctcgtgcagaccacgccacacggagagtatcggttgttgcaggagggtgatgattgggtgttgcagtttaatcatcatcagcattggcagtcgatgtaccgttttgatctctgcgagcagcaacaaagcgattatgtgatgggcaatttctggtcggcgcactggccgcagtcgcattttcgccatcatttgctgatgtgccgccatttgccggacggcggcaagctgacactgaccaattttcattttacccattatgaaaatgggcacgcggtggagcagcgaaatctaccggatgtggcgtcattatatgctgtgatgcaagaacagtttggtctgggcgtggatgatgcgaaacatggctttaccgtggatgagttagcgctggtgatggcggcgtttgatacgcacccggaggcgggaaaataatttatgtcaggttgccggatgcggcgtaaacgccttatccggcatacattagcccggttgtagacctgacaggcgaagcgcatcagacaacggtttcagagttcaattgcccattcggcatgaaacaaaatcaccgctgtgcctgaaatggtgactttttccggttggttatcacgaattgtcaccgtcacttcaatcataccgtcacgccccaatgcgcgcccctgatggcctttaacacgcaacacgttgccatcgtggggcaatacgttgtgatgtaccaaccatgcacccatcgggccattggcattgccagtcaccggatcttccacaataccaatcgcaggcgagaacatgcgaccatcggtttcgtttttgcctgggcggatctggaacgggaagaaaccattgcagccaatctttttgctgatagcggtcagcgcattaaggtcaggcgaaagggcgtcgatatccacttccggtttcagtgggatcatcacttttgagtgtcctgttgttgccacctgaattggcaagcctggcagaatatcgtcctcagtgagatgaagcgcgttgataatcgccgcacgtgtttcaccttccagcggtggctcaaagcccggcgtaccttgttccagcgaaatacgataatcatcgttgtgcttttcgatagtcacgcgatgttttcctgccagcgatgtttgccagatcgtgcaatttcctaaacctaacaccttcgcacgtacatagtgcgcagctactgtcgcgtgaccgcaaatcggcacttcaaccgttggcgtaaagtagcggatgcgcacatcgctgtcgtcgctgtgcagcagaaaagcagtttccgaatggcctaactcgcgggcgataagctgcatttgcgcttcgctaagattatcggcggggaaaacaacaccggcagaattgccgcgaaacggttgtgaggtaaaagcatcgacgtggtacacctgcggtttcattaacgttctcctgtgactggagaactatcatagcctgcaagtggccggagagcgaagggctatccggccagggtgaaattatcgccgcgaacgcacaatttgatatcgacgagtaaagtactcaaacggcgcgctccacacatgcaccagtcgggtgaacgggaagagcaggaagatggtcattcccaacaccagatgcaggcggaagacgaacgctacgccgttgagcatctctgacgatccaccacggaaagtgacaatgctttgcgcccaacccaccagcttcatcatttcgctaccatcaggatactgtgctgaaaacggtatggtacttagccccaacagacactggatcagcaaaatgctcatgatgatgatatccggcgtagtggaagtggcacgcacgcgctgatttgtcagcctgcgccacagcagtcctgcgccgccaatcaacgtcaacacaccgcaaataccgccgagcaccatcgccatgagttgtttcgctgccactggcaaaaaccacgcgtacatccagtgcggcgttaacatgccgaacaagtgcccgaagaaaatccccaaaatgccgatatggaacagattcgaccatatcaccatcccgcgtttatcgagcatttgacttgaggaggcgcgccaggtgtactgcccgtagtcgtagcgcagccagctgccgaggaaaaacaccgtcgcacaaatgtacgggtagatatcgtaaaaaaagacgttcagatactgaatcatttcccacctcccgcactgatgtcgacatattgcggcgcgacatcctggctaaagcgtcgctgatattgattaagcggcgagctgtcacacgccgtggcgttatcttcaataaacttcacctgttcctcttcccacactgcatcaagcgcctggcgggtgtcatcgcgctcttcgctgtttacttgttttgtgacactgtcacttgaaagggagcttcccgccagttgcagcagagcatcaaacaacgcgtaccacggtgcctcgcgttgttttaagcgaccgccaagcagggcgaggatcggcgcaacattgagcaatccttctttcgcctgatcgtcaggcagtacgcttaaatactccagatacagcggtagataatcgggcagttcccgacaatccagctgcaggccgaccttttcatactccgccagcaggtccaccattgcctggccgcgatcgcgggactcggcatgaacatgttcgaacagcagcagcgacgtggtgcgcccgcggtcaaacacttcgcaccattcggcctgtttatccagcagcggcgcgttaagcaggttgtgggtgaaatccgtaagcatcggcgcgtcgcggcggatcaacgccagcgcgtcctccttgcattcccacaacagctcgtccggatactccatcaacaggccgatcactttgaggatctgcattattcgccctccgctttgtcgcgcacttcggtgatgttgatggcatcgatacggctactgttgaacaggttgaatttactgtccgaaccgtggcaaccgtcgccaaaggtaaaaccgcagccgttgcgttctgcgaaggcatcgcccgccatttcccgatggctggtcgggataacaaaacgatcttcatagttggcaatggcgagatagcgatacatctcttcgacctgggcgacgctcaggcctacttcgtcgatggcacgagtatcagtaacgccttccacggtttgtgaacgcatatagtggcgcatcgccatcatccgtttcagcgcccgcagtaccggaccggtatcgccggcactcaacatattggcgagatattgcaccggaatacgcaggctttcgatggcgggcagcacgccttcgcttttcggcaaaccgcccgcatctgcgtaggactgaatcggtgacagcggaggaacgtaccagaccatcggcagggtgcggtattcagggtgcaacggtagtgccagtttccagtccatcgccattttgtagactggcgaacgctgggcagcgtcaatcacattttgtggaataccttgtttcagggcttcctcgatcactgagggatcgtgtggatcgaggaacacttcgcactggcgttcatagaggtcaacttcgcgctcggtgctcgccgcttcctcgatgcggtcggcgtcgtaaagcagcacgcccagataccggatgcgacccacgcaggtttctgagcacacggtcggttgaccggactcaattcgtgggtaacagaagatgcatttttctgacttgccgcttttccagttgaagtagatttttttgtacggacaaccgcttatgcacaaacgccagccacggcatttatcctgatcaatcagcacaatgccgtcttcttcgcgtttgtagatagcgccgcttgggcaggtcgccacgcagctgggattgaggcagtgttcgcacaggcgcggcaggtacatcatgaaggtgttttcaaactgcccgtacatctccttttgcatggcctcgaagttgcggtcgcgggcacgtttttcgaactcaccgcccagcagttcttcccagtttggcccccagatcactttgtccatccgtttgccgtcaatcagtgaacgcgggcgagcagtaggaatatgtttgccttccggtgcgctatgcaaatgttcgtagtcgaaggtgaaaggttcgtagtaatcatcaatctgcggcaccaccgggttggcgaagattttggttattacgcccatcttgttgcccagacgcgggcgtatcttgccattcacatcacgcacccagccgccttgccactcttcctgatcttcccagtttttcggataaccaatgcccggtttggtttcgacgttgttaaaccatgcgtactccatgccttcgcgcccggtccagacgtttttacaggtcaccgaacaggtatggcagccgatacatttgtcgaggttaagcaccatgccgacttgtgaacggattttcattttttcgcctcctgtacctgatcgcgaccttcatcatccagccagttaacgttcttcatcttgcggatcatgatgaactcatcgcggttcgatccgacggtgccgtagtagttaaagccccaggccagctgcgcgtaaccgccaatcatatgcgttggtttcgggcaaacgcgggtaaccgagttatgaatgccgccgcgcatgccagttacttccgaaccaggaatattcataatgcgttcctgggcgtgatacatcatggtcatgcccggcggtacacgttggctgaccaccgcgcgggcagtcagcgcgccgttggcgttgaatacttccacccagtcgttatcgacaatggtcagttctcgggcatctgtttcgctgatccagacaatcggtccaccgcgagagagcgtcagcattagcaggttttcactgtaggttgagtgaatgccccatttctggtgcggcgtcaggaagttaagtgctttttccgggaagccgtttggcggtatctggcgcatctcactgacgctacgggtgtcgataggcgggcgataagccaccaggctttcaccaaaagcacgcatccacggatgatcctgatagagctgctggcgtcccgacagcgtgcgccacggaattaactcatgaacgttggtgtatcccgcgttataggagacgtgatcgctttccagaccggaccaggtggggctggagataattttacgcggctgcgcctgaatatcgcgaaagcgaatcttctcgtcctctttgtgcagcgccagatgggtatgttcgcgcccggtgatctcgcccagcgcctgccacgctttgactgcaacatgaccgttggtttccggtgccagtgccagaatcacttctgaagcgtcaatggcggtgtcaatcagcggacgcccctgtgccgggccatcacgcttggtgtaattgagtttgccgaggaaatcgatttcatcctgggtattccacgaaatccctttaccgccattgccaagtttgtccatcaatggcccgagcgaggtaaagcgttcatacgtagcagggtagtcgcgctccaccgccacaatattcggcgcggttttgcctggaatcagatcgcattcgcctttgcgccagtcgagcacttcacacggctgtgagagctctgccggagagtcatgcagtaggggttgtaataccacgtcggtttctttgccaagatgacccacgcacacttgcgaaaatgctttggcgatacctttgtagatttcccagtcgctgcgtgattcccacgccggatcgaccgccgcagaaagcggatgaataaacggatgcatatccgaggtgttcatatcgtctttttcgtaccaggtggcggtgggcagaacgatatcggagaacaggcaggtactggacatgcggaagtcgagcgtcaccagcaggtcgagcttgccttcaatcgctgcagtttgccactcgacttcttccggtttgatcccgtcgctggcaccgagttcctcgccctgaatcccgctttcggtccccagcagatacttctgcatatactcgtggcctttgccggaggagccaagcaggttagagcgccagacaaacaaattacgcggatgattgctgctgctatctggttgttcgcaggccatacgtaaatcgcccgatttcagcgcctgggcggtaaattctgtgggggataatccggccttgtcggcttcagctttaatcccgagcgggttacgccccagctgcggcgcagaaggtagccagcccatacgttcggcgcgaacgttgaaatcaatcagatgaccgctgtacttactggcatcggcgagcggtgaaagtaactcctgagcagagactttttcatagcgccattggctggaatgattgtagaaaaacgaggtgctgttcatttggcgcggtggtcggttccagtcgagcgcaaaggccagtggcaaccagccggtttgtgggcgcagtttttcctggccgacatagtgtgcccagccgccaccgctttgcccgacacaaccgcagaagatcagcatattgatcatcccgcggtagttcatgtccatgtgataccagtggttaacacctgcgccgaggataatcatcgagcgcccatgcgttttatgggcggtatcggcaaattcacgggcgatggtttcaatatactggcgcggcacgccggtaatttgctcaccccaggctggggtgtacggtttgatttcagcgtaatctttcgcactgttttcatcttccagcccgcgatcgaggccgtaattcgccagtaccaaatcataaacgctgaccaccggacaggtgttgccatcgactaacgtcaggtttttaacgggcaattggcgcaccagcaccggattgtgttttacgctgcgaaaatgcggattttcaatgccgccaaagtaggggaaggccacgcctgcaacagcgtcatgttgaccgagcagggttaacgacaattcggtttccgtaccggcggcaatggattccagattccatttgcctttttctccccagcggaaaccaatcgaaccgttcggcactaccaattcacctgcggtattaactgctacggttttccactgcggattgttgctttcgcccagtccatccaccaggtcagatgcgcggatcatgcgcccgggaacgtagctaccatcgtcgcgaggctccagcattaccagcatcggcatgtcgctgtagcggcggcagtagttgataaagtagtcgctgggattatcgagatgaaactcttttaaaatcacatggcccattgccatcgccagggcgctatcagtgccttgtttcggtgccagccactggtcgcacaatttggccacttcagagtagtcaggggtaatggcgatggttttagtgcctttgtagcgtacttcggtaaagaagtgggcgtccggcgtacgtgtctgcggtacgttagacccccaggcgatgatgtagctggagttataccagtcggcagattccggtacgtcggtttgctcgccccaggtcatcggcgaggcgggcggcaggtcgcaataccagtcgtagaaacttaaacaggtgccgccaagcagcgacagataacgcgttccggcggcgtaagaaaccatcgacatcgccgggatcggcgagaaaccggcaacgcgatccgggccgtaggttttgatggtccagacgttagcggcggcaatcagctggtttagttcctgccagttggagcggataaacccgccgcgcccacgcacttgtttgtagctcaggcacttttgcggatcgttcataatcgatgcccacgccagtaccggatcgctgtgttgcttgagggcttcgcgccacagttcaatcagtcgtttacgaatgagcgggtatttcaggcggttagcgctgtaaagataccaggagtaacttgcgccacgcgggcagccgcgaggttcatgattgggcaggtcagggcgagtgcgcgggtagtcggtctgttggatttcccaggtcaccagaccatttttaacgtagattttccagctacaggagcctgtacagttaacaccgtgggtggaacgcacgattttgtcgaactgccaacgctggcgatagctgtcctcccagtcgcggttgctatgcatcacctgtccgtgaccatcggcaaaggtttcgcccttttgtttgaagtagcgaaagcgatccaaaagtttactcatgacatgactcctgctccaggaatgaattgggatctgatgccttgtcggatgcgacacggttgtacatcaggcatcgatctcttatttttggctgaacttccgccgaccataaaccagccaggtcagcagcacacaaacgatgtagaagattaaaaacactttcatcgcgccgaccggagagccggtcatattgagcgacatgccaaacgcctgcggaataaaaaagccgcccactgcgccaatggctgagataaagcccagagccgccgccgtttcggtgacggcttctttatgagcttgctcatcactaccgcctttcatctttacccgataaatggttatctggcgaaagatgacggcgatcatctggaaagtagaaccacttcccagacccgcagtcagaaacagccccataaatacggcgtaaaaggcgatgaaattaccggagcctgtgcccggtaaggtaaggaacagcagggcactgaaaatcgccataaaaataaagttgatcaacgtcacccgcacgccgccgaacttatcggaaatagcaccaccaaccgaccgcgcgatggcaccgataaatgggccaaagaacgccaggcgcagaatattcacatccgggaactgggtttttgccagcatggcaaaacccgcagaaaaaccgataaacgaaccgaaggtggcaaggtaaagcaggctcagcagccagagatgcaggcgttgtaagacagggagctggtcggcaattgaggcgcgtgaactggcgatatcattcatccctgaccatgcggcgatcgtggcaatcgccagtagcggtacccaaatccatgcggcattcgccagcgacatcaccgaaccgtcggcctgcggtacgccattgacgccgagaaaggcaaatacaggtacaaaaatgaccagcggtgcaaccagctgcattacacttacacctaagtttcctaatccgccattaatcccaagagcgctcccttgtttggcttttggaaagaagaaactgatattgcccatgctcgaagcaaagtttgcacctgcaaaaccgcatagcaaagcgataacgataaatatcccaaaaggagtattcggattttgcacggcaattccgagccagacgcaaggaataatcaggattgcagtactaaaaaccgtccatcggcgtccaccgaatataggcaccataaaggagtagggaacacgcaataatgcgccagaaacggagggtaatgcggttaataaaaagagttgatcggtagtaaaattaaaaccgattttattgagattaacggtaactgcgctaaatagcatccagacacagaaggcaagaagtagacaactgactgatatccagagatttcttcgagcaatatgttttcctttattttcccagaaggccggattttctggtttccagtcgcgcaaaagataacgactatttttctcattttgcagtgccatattgttcctcacatgcacacattggtaatgaaaaaaagacaaaacacgaggtaaggcgcaatagccagttattagaattaaggatgaattgggtgaagtgctgattgaaagaatagataagaaagcgtaaccgcgggggcagaatggggattaagtagccagatatgtgttactaaatgtaactaacaagctaaccttcaaacggggttaatctttgaacgtatgtcatgtttcaacccttcagatcgtgaatctaaagggttacatattaactatattatcaacaagaccagacacttatagaattagtgatgatttattcactaaaaaggccatgaactggaggaaaacgatctgtccagaaggtctatcggttcctctcttattgcctgattgtaataatcgttattacagtaagtattgtttatttcatctaaggtcatgtttttaacttttatattcatctggtttacaacttcctctgtcttgtaagtgtgtatattatatggggtatatgcttttttaataggatagtgaaacaattcgttatccacatctattccgtcagagtgaacttcaaatgcaccaggcgaaagaattgccaggccagtattaagcttaagtgctggggaaaacaaattaaataacatgagctgcatagtagggcaattgttcttcccagaaacatttaaaaaatttaagttttgctctgttttattatggggaataaagttccaatatcggatgtattattagtatcaatgtgggttattttattattgtccagtcttaaacttttgatagatggaagataagtcaggaaatcaagatttatatatttcaactggttgttagcagcgtttaatgtctgaacattgcagaagttgctatagaatattttaatttcagaaagcaaattgttgttaataagtaacgtattcaagttgggaaataagtcattgtgtaaacttgttagtttattatgggatagatccagcagtaagagttcatttttattacctgcaacaatatcagttaattgattatggctgagattcaggtattgcagccattcgcaagattctaattgcacaaactctagttgattatgtgccgcactaaaataagtaactgatgaaagcctatctatatcaatatttctgagagcattattattcatagatatatgtgtaatacttacatttctgccttgaggaaaatttattgactcaagagcattactattcagacttagctttacgagtctatcgtagttggttgcatcaaaatgtgtgaattggttattatcaagattgatagatgtgaagttttgcagccctggtggttgagtggttaaattaagtcctgataaatcaatggtcacttcattagtgtcatcaattatatttcttactgcagtccagtactgcatttgtgcaagtggatcattgttgatgccgttaactaatacatgccaaagatgttttgatgatattagttgatcaatgtcattggttggcagtaaattgttattgcttaagtttaaatattccagttttgtagtgtttttggcgtttaaatgtgcaatatggttgtcgtttaaagtgattgttttcatcctgggatgattgtgtaatataaggtcagtgatcatattgtgatgggcacttaactcaatcagagattcttgccgcgcgagccgttggcttcatcgttatagcctttaaaatcatattcccagtgaccaaaaccaatcatttgatcattgatttgcgtttctcctttaaagccgagacgggcataagttttatcaccatcgtcacgcttatcatcagtaaaataacgtagagcggtaaccttgccataaaggtcgagtttattaccatccttgttatagacttcggcagcgtgtgctacgttcgcagctaacaaaccagttacaaccaccgcaactatttttaatttcatttaacagaatccttttaattatcgttaaacgtattttctaaacgaattttaaacggcgtcatttataaatgacatactgtttttaaaatagaatggtgattaaaaacaatgagaaaaatagatgaaataatattatttatcgatatgtgatcgaagtcgaaatgagatataaggtgaattactggtatttgaaatttatttttttaatattgtcggaatttatctgattaactaccgggccgtagacccggcagttattttaaccacgacgtgtcgccagccagcagagcagggaaccgccgcagaccatcagcgcgccttgccagaacgagaacgacagcggggcgctgagcagcacggctgcaagcgctgaggaaagtacaggcgtaaaatacgaacctaccgccataatggtgacattgccatgcaatataccgacattccatgcagcataagcaaatcctaaggtaaatgccgcagagatgagtttaatcatgacgggcgtgctaaatatcatttctggttgtggcgtaagaaaatagtaaacccacagacttgctcccgttagcaggacaaaaacggtaattccattaaatccgcgtgcgtatttattcgttactgtgcaataggctgcccagataaacgcaccaatgaacgccaggaaataactcaatgggctggtggtgatattattgatgatttcatcataatgtaacccattgtcaccgcctaacacccaacagacgccgacgagggctaataataatccaggtacaatcaaccagttggttttctgaccattaaacagaatggcaaagagaattgtcaggctgggccacagatagttcaccatacccacttcaatcgcctgatgatgggtcgccgcataccctaaggaaagcgccagacagatttcatagctgacgaataacagactcccggcgagtaaatagcctttcgggatttgccgaatacgcggaaatccaaccgtgaagattaacagcagcccgcttaatgaatagatagcagctgcgccgccgaccgggccgagcccctcactgacaccgcgaatcaatcctaccatcgtgctccacaggacgatcgctatcagccctatgagcgttgctttttgtcgtgtcatgctcgctgttttgtctctcttgccgttaaaaattaagctgaattttatagcatttttttaactggcctgtcaggcagtggtgcgtttttctaccgctattgaggtaggtcaatttgcgaaggcggattattttgtggcaaacagatgttctttttgatttcgcgcaaaaagattcagaattttactgttagtttcctcgcgcagtaatacccctgaaaaaagaggaaagcaatggacgtcagtcgcagacaattttttaaaatctgcgcgggcggtatggctggaacaacagtagcggcattgggctttgccccgaagcaagcactggctcaggcgcgaaactacaaattattacgcgctaaagagatccgtaacacctgcacatactgttccgtaggttgcgggctattgatgtatagcctgggtgatggcgcaaaaaacgccagagaagcgatttatcacattgaaggtgacccggatcatccggtaagccgtggtgcgctgtgcccgaaaggggccggtttgctggattacgtcaacagtgaaaaccgtctgcgctacccggaatatcgtgcgccaggttctgacaaatggcagcgcattagctgggaagaagcattctcccgtattgcgaagctgatgaaagctgaccgtgacgctaactttattgaaaagaacgagcagggcgtaacggtaaaccgttggctttctaccggtatgctgtgtgcctccggtgccagcaacgaaaccgggatgctgacccagaaatttgcccgctccctcgggatgctggcggtagacaaccaggcgcgcgtctgacacggaccaacggtagcaagtcttgctccaacatttggtcgcggtgcgatgaccaaccactgggtggatatcaaaaacgctaacgtcgtgatggtgatgggcggtaacgctgctgaagcgcatcccgtcggtttccgctgggcgatggaagcgaaaaacaacaacgacgcaaccttgatcgttgtcgatccccgttttacgcgtaccgcttctgtggcggatatttacgcgcctattcgttccggtacggacattacgttcctgtctggcgttttgcgctacctgatcgaaaacaacaaaatcaacgccgaatacgttaagcattacaccaacgccagcctgctggtgcgtgatgattttgctttcgaagacggtctgttcagcggctacgacgctgaaaaacgtcaatacgataaatcgtcctggaactatcagctcgatgaaaacggctatgcgaaacgcgatgaaacactgactcatccgcgctgtgtgtggaacctgctgaaagagcacgtttcccgctacacgccggacgtcgttgaaaacatctgcggtacgccaaaagccgacttcctgaaagtgtgtgaagtgctggcctccaccagcgcaccggatcgcacaaccaccttcctgtacgcgctgggctggacgcagcacactgtgggtgcgcagaacatccgtactatggcgatgatccagttgctgctcggtaacatgggtatggccggtggcggcgtgaacgcattgcgtggtcactccaacattcagggcttgactgacttaggcctgctctctaccagcctgccaggttatctgacgctgccgtcagaaaaacaggttgatttgcagtcgtatctggaagcgaacacgccgaaagcgacgctggctgatcaggtgaactactggagcaactatccgaagttcttcgttagcctgatgaaatctttctatggcgatgccgcgcagaaagagaacaactggggctatgactggctgccgaagtgggaccagacctacgacgtcatcaagtatttcaacatgatggatgaaggcaaagtcaccggttatttctgccagggctttaacccggttgcgtccttcccggacaaaaacaaagtggtgagctgcctgagcaagctgaagtacatggtggttatcgatccgctggtgactgaaacctctaccttctggcagaaccacggtgagtcgaacgatgtcgatccggcgtctattcagactgaagtattccgtctgccttcgacctgctttgctgaagaagatggttctatcgctaactccggtcgctggttgcagtggcactggaaaggtcaggacgcgccgggcgaagcgcgtaacgacggtgaaattctggcgggtatctaccatcatctgcgcgagctgtaccagtccgaaggtggtaaaggcgtagaaccgctgatgaagatgagctggaactacaagcagccgcacgaaccgcaatctgacgaagtggctaaagagaacaacggctacgcgctggaagatctctatgacgctaatggcgtgcttattgcgaagaaaggtcagttgctgagtagctttgcgcatctgcgtgatgacggtacaaccgcatcttcttgctggatctacaccggtagctggacagagcagggcaaccagatggctaaccgcgataactccgacccgtccggtctggggaatacgctgggatgggcctgggcgtggccgctcaaccgtcgcgtgctgtacaaccgtgcttcggcggatatcaacggtaaaccgtgggatccgaaacggatgctgatccagtggaacggcagcaagtggacgggtaacgatattcctgacttcggcaatgccgcaccgggtacgccaaccgggccgtttatcatgcagccggaagggatgggacgcctgtttgccatcaacaaaatggcggaaggtccgttcccggaacactacgagccgattgaaacgccgctgggcactaacccgctgcatccgaacgtggtgtctaacccggttgttcgtctgtatgaacaagacgcgctgcggatgggtaaaaaagagcagttcccgtatgtgggtacgacctatcgtctgaccgagcacttccacacctggaccaagcacgcattgctcaacgcaattgctcagccggaacagtttgtggaaatcagcgaaacgctggcggcggcgaaaggcattaataatggcgatcgtgtcactgtctccagcaagcgtggctttatccgcgcggtggctgtggtaacgcgtcgtctgaaaccgctgaatgtaaatggtcagcaggttgaaacggtgggtattccaatccactggggctttgagggtgtcgcgcgtaaaggttatatcgctaacactctgacgccgaatgtcggtgatgcaaactcgcaaacgccggaatataaagcgttcttagtcaacatcgagaaggcgtaagggggcgaacagatggctatggaaacgcaggacattatcaaaaggtccgcaactaactccatcacgccgccttctcaggtgcgtgattacaaagcagaagtcgcaaaacttatcgacgtttccacctgtatcggctgtaaagcctgtcaggtggcgtgttcggagtggaacgacatccgtgatgaagtggggcactgcgtcggggtttacgataaccccgccgatctgagcgccaagtcctggacggtgatgcgctttagcgaaaccgaacagaacggcaagctggagtggctgatccgtaaagacggctgtatgcactgtgaagatcccggctgcctgaaggcgtgcccgtctgctggtgcaatcattcagtacgctaacgggattgtcgatttccagtcggaaaactgcatcggctgtggttactgcattgccgggtgtccgtttaatattccgcgcctcaacaaagaggataaccgggtatataaatgcacgctctgcgtcgatcgcgtcagcgtcggccaggaaccggcttgtgtgaaaacctgtccgaccggggctatccacttcggcaccaagaaggagatgctggagctggcggaacagcgcgtggcgaaactgaaagcgcgtggttacgaacatgctggcgtctacaacccggaaggggtcggtggtacgcacgttatgtacgtgctgcatcacgccgatcagccggagctgtatcacggtctgccgaaagatccgaagatcgacacctcggtaagcctgtggaaaggcgcgttgaaaccgctggcagcggctggctttattgccacttttgccgggttgattttccactacatcggtattggcccgaataaggaagtggacgatgacgaggaggatcatcatgagtaagtcgaaaatgattgtgcgcaccaaatttattgatcgcgcctgtcactggaccgtggtgatttgcttcttcctggtggcgctgtccgggatttcgttcttcttcccgacgctgcaatggctgacgcaaaccttcggtacgccgcagatgggacgcattttgcacccgttcttcggcattgcgattttcgtcgcactgatgtttatgtttgtgcgttttgtgcatcacaacatcccggataagaaagatattccgtggctgttgaacattgtcgaagtattgaaaggcaatgagcataaagtggcggatgtcggtaagtacaacgccgggcaaaagatgatgttctggtcgatcatgagcatgattttcgtgctgctggtgaccggggtgattatctggcgtccgtactttgcgcagtacttcccgatgcaggttgttcgctacagcctgctgatccacgcggctgcgggtatcatcctgatccacgccatcctgatccatatgtatatggcattttgggtgaaaggatcgattaaagggatgatcgaagggaaggtaagtcgtcgctgggcgaagaaacaccatccgcgctggtatcgtgaaatcgagaaggcagaagcgaaaaaagagagtgaagaagggatataatctcttttgaactttaagctgaaaatggcgctgtaaaaggcgccattttcatattgtagacaacgtaggctttgttcatgccggatgcggcgtgaacgccttatccggcatgaaaacccttcaaatccaatagattgcagtgaacgtgtaggcctgataagcgtagcgcatcaggcaatgttgcgtttgtcatcagtttcaaatggcgctgtaaaaggcgtcattttcatattgtagacaacgtaggctttgttcatgccggatgcggcgtgaacgccttatccggcatgaaaacccttcaaatccaatagattgcagtgaacgtgtaggcctgataagcgtagcgcatcaggcaatgttgcgtttgtcatcagttctaaatggcgctttataaagtgccatttttttattgcgtaaccagacggcgtaatcgcgacacatccactgttttttctgcctctgccagactccaggcgttttgcagattcagccacatttgcggcgaactgccgatcaccacggaaagtttaatcgccatttctggcgtcaaagctgcttttcctgtcagcaatcggcttgccgttgagggagcaatttccattgctctggcaaactcgcgcaggctgacattaagttcgtccagtgattcctgaataatgtcccccgggcggggatgattggccattttcattagtgtctttactctcagtagcgttccttcactgggaacactatcattattgttccttcctacgcaacaataatccatttagccatttcatgttggagagtgtgcgatgctgcgacccgaacatggcagtcgcagcaaaggcctcttagtgacggaaatcaatcaccatgcggccacggattttgccttcttccatctcagtaaagatggtgttgatgtccgctaacggacgcagggcgactttcggcaccactttaccttcggcggcaaactggaaggcttcagttaaatcctggcgcgtgccgaccagcgaaccgaccacttcaataccatccagcacaagacgtgggatatccaggctcatagactccggcggtagaccgacagccacaacacgaccgcctgcacggacagcatcaactgccgagttaaacgcagctttagctaccgctgttaccaccgcagcgtgagcgccaccagttttctcctgcacaattttggcggcgtcttcggtgtgtgagttaatcgctaaatctgcgcccatttcggttgccagttttaactgctcatcattgacatcaatggcgatcactttggcgttaaagacattcttcgcgtattgcagggcgaggttacccagaccgccaagaccgtagatagcaatccactgccctggacgaatttttgacagcttaacggctttgtaggtggtgactcccgcacaggtaatgctgctggccgccgccgagtccagaccatctggcacttttaccgcgtaatcggcgaccacgatgcactcttccgccatcccgccatcaacgctgtatccggcatttttaactgaacggcagagcgtttcgttaccactgttacagtattcgcaatgaccgcatccttcgtagaaccacgccacgctggcacgatcgcctggttttaatgaggtgacacctggacccacttctgccaccacaccgatgccttcatggcccagaattacgccggttttgtcaccaaaatcgccattcttaacatgaagatcggtatgacatacaccacaacactccattttcagcagggcttcgccatgtttcagtgagcgcagtgttttatacgtaacgtcaacatgatgatccttcgtaacaactgcagccttcatagttcctccttttcggatgatgttctgcatagcaggtgaggcaaatgagatttattcgccactacccagtatggatgagatctgaaaaagggagagggaaatagcccggtagccttcactaccgggcgcaggcttagatggaggtacggcggtagtcgcggtattcggcttgccagaaattatcgtcaatggcctgttgcagggcttcggcagaggttttcaccgccacgccttgctgctgcgccattttgccaaccgcaaacgcaattgcgcgggagactttctgaatatctttcagttccggcagtaccataccttcgccgttcagcaccaatggtgaatactgcgccagcgtttcacttgccgacatcagcatctcatcggtgatacgtgacgcgccggaagcaataacacccaggccgatgcccgggaaaataaaggcgttgttacactgggcgatagggtagattttatctttccataccactggattaaacgggctgcccgtggcgaccagcgcgttaccttcggtccaggcgataatgtcctgcggtgtggcttccacgcgtgacgtcgggttagacagcggcatcacgatcggacgcggacagtgtttatgcatctcacggatgatctcttccgtaaacagcccggtctgtcctgagacgccaatcagaatatctggttttacattgcgcaccacatccagcagtgacagcacatcgctgtcggtatcccagtcactgaggttttcgcgcttctgcaccagtttggtctggaaaggcagcaggttcggcatcttgtcagtcagcaagccaaagcgatcgaccataaagactttctgccgcgccgcttcctcgcttaatccttcgcgctgggtctgggagatgatcatttcggcaatgccgcatcccgctgaacctgcgccaaggaagacgatttttttctcgcttaactgaccacctgccgcgcggcttgctgcgatcagtgtgccgactgttaccgccgcagtgccctgaatgtcatcgttaaaagaacaaatttcattgcgatagcggttaagtaacggcatcgcatttttttgagcaaagtcttcaaactgcaacagcacgtctggccagcgttgtttcacagcctggataaattcatcaacgaattcatagtattcgtcgtcagtgatacgcggattacgccagcccatatacagcggatcgttaagcagctgttggttgttcgttccgacatccagcaccaccggaagggtatacgccgggctgatgccgccacaggcggtatagagcgacagtttaccgatcggaatgcccatcccgccgatgccctggtcaccaagccccagaatgcgttcaccgtcagtcaccacaatcactttaatattatggttcggcacgttttgcagaatatcgtccatattgtgccggttctggtaagagataaacacgccgcgtgaacggcggtagatctcagaaaaacgctcacaggctgcgccgacggttggggtataaataacaggcatcatctcatcaagatgattgtttaccagacggtagaagagggtttcgttagtgtcctggatgttacgcaggtagatgtgtttgtcgatttcggttttgaatccctgatactggatccatgctcgttccgcttgttcttcgatggtttcgaccacttccggcagtaaccccagcaggttgaagttacggcgttcttccatgctgaaggcactgcctttattcaacaacggaaattccagcagtacagggccagcgtaagggatataaagcgaacgctgtttttttgtttttggttccatgtcactcactcttttttgaatatccatccctggggggcttttatcgtctttgctttaccgccagggcgtcggcctcaagtataaagcagataaaaacaaaaacaccattgcgcaggcaatggtgtttaatcgtcattgaggactgatggttatgaattacttttcagcggggcgttttctgccggttgggttatttactacgctggatttgtcaccttcggtaactattttgcgctggttagaaattttatggtccagtccaagaatatgacgtgcctgacggttcgatttcattttaactcctcaatcctgtagctagttttaaggacaacatcgccgtagcgaagaaacacgtgctaaacccctaaattaggttgccgatcaagcatagcaccttaaagcgtagggtgctggccactgaccacataattgatcgtttgctggtagatatcactgaggatgtcgttatcagaagcttcaacccatttggtcagctccatgagaatgtcatcttcagtgacaacaccatgctgtgcccgaaggccttgctcaatggcattaaccagagcgggttctgctgttgaattttctgcctgataataagtaaacatagtgattctccgtgtctgtgtatttatggtgtctgctacggatcgcagatttataaagcacattcagcatggcaaatatttgccgcttcgttgttaagattagtcctggttgatgatttttatattttaacaccatgatattcatagggattgtgattggtatgatccgattaatattgatacaatatcttttgggttatatattcccggtaatctattgtgggaatttaatttaagtgcagaagtaatattttcgccggattttattcggaatatcctgcttatcctcgtgctgtttctcacgtagtctataatttcctttttaagcccacaggagagcaacaatgacaatccataagaaaggtcaggcacactgggaaggcgatatcaaacgcgggaagggaacagtatccaccgagagtggcgtgctgaaccaacagccgtatggatttaacacgcgttttgaaggcgaaaaaggaaccaaccctgaagaactgattggcgcagcgcatgccgcatgtttctcaatggcgctttcattaatgctgggggaagcgggattcacgccaacatcgattgataccaccgccgatgtgtcgctggataaagtggatgccggttttgcgattacgaaaatcgcactgaagagtgaagttgcggtgccgggtattgatgcctctacctttgacggcataatccagaaagcaaaagcaggatgcccggtctctcaggtactgaaagcggaaattacgctggattaccagttgaaatcgtaaagcattgccggatgacgcgtcaggcgcgtgaatgcctgatgcgttgttagcatctctacagcgcccgccagcaccggagctcacgtccgtcctcccttattgctaatgattgccggacttcacatccgtgggttgccagcgggcaacgttcgtagaaaaaacagccttgcggcaacgtgcggtttcccggcagatccgttttacgtaatgcccattcttcctccagcggtttatcaatggcggggagggaatccagcaataatcgggtgtatggatgtgcaggtgccgtcagcacctgctgcgcgtcgcccagttctacaatctgcccgagatacatcaccgccacccgatcgctcatatgacgtatcaccgagacattgtgtgaaatcagcacataggtcagcccgtgattttcctgtagcgttaccagtaaattgaggatctgcgcctgaacggagatatccagcgcagaggttggctcatcaagcacaatcacgtcaggctgcgaagagagtgctctggcaatggcgatacgttgccgctgcccgccggagaacgcatgaggcaggcggtcgagatactccggacgaatacccacctgcacagccaactcctctgccaacgctcgccgctgttgttcactactacgcttagctatccagagcggttctgtgatgatgcgccacaccggtaagcgcggattaagcgaagagagcgggtcctgaaacaccatctgcataatgcgttgtgagccagaacggatgtactgcccgtggctcggttgcagcatacccattaaaagctgtgcgagggtgcttttgccgcagcctgactcgccgacgatccctaaggtttcaccacggcggatctgtaaatcaataccattaatggcatgaacatgttccgtagttttaccaagccagtttttacgggccgggaaattgatatggacgtcgcgtaacgttaataacgtgtcagacacttataacctcctgctgcggataccaacaggcacagcgctggttgttgtcaccacacgctgtcagcgccgggacgttttcacactgtgcacctgccgcatagcaacgatcgcgaaaagcgcagccgtcaggcaaatgggtgaggtttggtaccgtccctggaatggcgggtaatagctggcgtggtactccatgttctggtgcgcattgcagcaaaccaatggtatacggatgccggggatgatggataacgtctgccgtcacgccgctttcaattacgcttccggcatacatcacgtaaacgctatcgcacagttgcgacaccacggccatatcatggctgatgaacagaaccgcagttccactggcgcgggctttatgtttaagcaaacgcagtacctgcaactgcaccgtgacgtccagcgccgtagtcggttcgtcggcaataatcaattgcggctcgcaggagaatgccagcgcaatcattacccgctggcgcataccacctgaaagctcaaacggatagcgcgacataacttccacggcatccgggatttgcatctcttccagcaggtcaatcgctttagctctggcttcccgacgacttattggttgatgatggcggatcacgtccatcatctgaagacctattcgacgtgtcggattgagggcggtcatcggttcctgaaagatcatcgccactcgtgcgccgcgccactgacgaagctgtttttcccgcgcgttaagaacatcttctcccagcagggaaatctgcccccgatgtacgcaataactgcccgtcggtagcagacgcataatcagcattgcggtgactgatttacctgagccggattctcccaccagaccgacaatttcaccgcggttaatctgcaaggacacattgttgagcgcgtgaacatcaccgttaaaaccggggaaactcaaatgcagttgttgaatgtccagaacgggttgggtcatgactgctttcctcctgctttcgggtcaagcagatcgcgaataccatcaccaaagagattaaacccgacggcggtaagcaaaatcgctgcccccggaaatgcgcaataccaccactgatcgagtacatagttgcgaccatttgctaccatcgcgccccattcagcactcggttgttgagcacccaggccaataaatcccaacgtggcggccattaaaatcgcgctaccgatatccagcgatgcctgcacgatcagcggcggtagggagttacgtaaaatatgccagttgatcagatgccaacgagacgcgccaaaggttttcgccgcctgaacataggtatactggcgtacaactaatgcttgcccccgcgccaggcgcacataaaagggaattcgcacaatagcaatagccagcatggcgttaaacaaactcggcccgagagcggcagccagtgccattgtcagtaccaacgaaggaatcgacagcataatgtccatgatgcgcatgatgatggcgtctgcgcgtccaccaagcacaccggatagacatccgagtagcgaaccaatcatacccgcaatggcaaccacgactaatccggcgagaattgattgctgactgccgaccagtacgcggctaaacagatcgcgtcccacttcatcggtgccaaaccagtgcgccgcagaaggcggcaaaaggcgggcggttaaatcaatggcgttgggatcatgcgtcgccagccacggtgaaaaaatcatcatcaatagcattaatacaatgatgactgcgctggtcacggtgagcggactgcctttcagcatccataccagttttgcaccgttaaatcgcgtttgtttttgtgggcgtacggcggacgtttcctcgcttagcatcattcaccacctccacgtccgatacgcggatcaatccacaaatagagcaaatccaccaccaggttgaccagcacataagcaaatgaaaccacgacggcaaagcccatcactgccgggaagtcgagcgcctgtattgatgttactacccatgcacccattccgggccaggcaaaaacggtttcggtgagcactgcgccatacaacaaatcgcccagcgccaaacccaatacggtaatcgatgggatcaacgcattgggtagcgcataacataaaacgatataccagccgggcaagccgctggcccgggcggtacgaatgtagtcttcactcaattgttccagcatcgctgagcggatctggcgagcgacaattcccaggtgaacgaacgccagcgttaatgccggtaagatgagatgttgcaacgcattgaagaagacttcaccgttgccttcaagcagcgcatcgagcagataaaagccggtaacgtgcgttggtggatccagccagtcatcaagccttccgccgccgggaagaatttgcagatgaccataaaacagcacaatgacgcccagcccaagccagaacgcaggtgtggagattccggtaatggccattattcgcaccagatgatccagccagcgatttcgccagactgcagagagtatgcccagcgggatgccaatcaggagtgccagcagcagggcaccaaaagccagctccagcgtcgccgggaaaaatatacgcaactcttccagcaccggacgcccggtacgaatggatgttcccaggtcaccatgaaacaggtcgctgacgtagcggtaaaactgtacatacagtggctggtccagtcccagttgctggcgaatattttccacgatagcatcgctggcgcggtcacccgccagtaaccgcgccggatcaccagggatcagatgcgagataataaacgtaatcacgcagacgcccgccaccacgagcaccagcccccagcagcgttggcgtaaaatactccagaaggtcacgttatttactcatggtattgatattgaagacctgttccagcatgggattgaacacaaagcctttcacctctttgttcatcgccagttggtagtttttctggaacaggtacacataagcagcgtcatcaatgacgattttctgtgcctgctggtagtcccgggtacgctgcgtctggtcggtggtcgcaagcgcattgcgcagtaacttatcgacctcactgttttcatagaacgagcggttacccggcagaccttttttgtctgactcaaaccagtaattcataaacatatacgggtcggcaaaatccggactccagttgccaatcgcaatgtcgtaatcacctttacccactctgtcgcgcatggtggcgttcgccagcttttccagcttcacaatgatgcccagcttgttgagactggattgtgtcgccagagcaataggctcccagttcggatcgttatcggagtagagaaacgtcaggctggtgggtttgctcgtcactttatcccattcggctttggctttcgtttcgtcatggttgtattgcattgccgtcgcatcgtagccccacatgccttccggaatcgggccgcgcatctgttttccgttaccactcagaatgccgttaaccatgccctgataatcggtagaccaggaaatggcccgacgcagatccgcctgattaagaggcgctttgctgttattcagatacagataggtaacgcgcagtgacggatactctgccacattgactttattttcctgcttcagggcgttgagttgatccaccggcagcgcatcggcaatgtcaatgtcgccacgggagagctgcaggcgacgggaggcactttcaccaataatttttaccgatacccgtttgaagttcggtttattgcctgggtaatgcggatttggcaccagaactaattgctgacctttttgccagcttttcagcataaatggtccggaaccggcggtattttgcgcgaggaagccgcgagcatcatccgctgcatgttcctttaagaccgccggattgataatggatgcaccgtcattcgccagcgtgtagaggaacggtgcgaatggttggctaagggtaaacttcaccgtatgttcgtcgggagcatcaatctttaaatctttgggaaatgcttctgctggcccctggccgatttttagtagccgctcaaaagaaagttttactgcttcggcagtgacaggtgtgccatcggcaaatttagcattatctttcagggtgaacgtccactctttttgatcgtcagacgctttccagctacttgccagatcgccttcaacgtcggttgagcctttatcaccgtccgttttgtactgaaccagccgctgataagacgggtaggtcactgtccagtcgttattatctattgttaccgccgggtcgagggtttgtggatcggcggccttaccaatcaccagcatatcttttggtacggcggcgtgcgcaaccgggaaatttgtggcaaggacgagcgcgagcaatgtgggacgaaacgatatcgatctcttcatgacagtttcctgattaactgacgtgctgtgtgccaggggatataaaacaagagaattgatcagcgagcagagggtaactcgctgcctggggtaattcgaagtgccaccattcgctggagataccgacaaaaccgccaccagtcattatcgcattcagcaacagccgattgcgctgagcggcgggcgggacggaagggtgataggcatgggagcgctcgtgcatttcatcgaaccctgcgcccatatcgaggatgttcccgtgctcatcacgaagcgtcaggtcgatcgccgtgccacggctgtgattagaaccgaccgtcacatcaacaacatattgcgggtctgggcaggcttgccacaacatcgcctgtgcttgttgtgggcgatacgcatcgtaaatcaccagttgtaaccctgacagctgggcgatgctgatacttttcgccagcgcggtaatcgcatccttgtgtaacagacaacgcgcttgctgataaatagctttacctgtgatgttatcagcgcaggcgtatttcaattcgatctccagatcagggaagattacggctaaatcaaccagttcggtggtatccgacataaacggttcctgtataagacaaaaattgctgcgctttccgcttatgcagatctcatgccatgccgggataagcgccagaatgctggcttaaagttatattttttaacttttgatcaacatttgtgcagcgtagtgcagttttggtgcaagaggggaagttaaggaaggaatctcccggaatcgtagctgaaatcacagtatttaagtgacagtgtcacgttaaatgaaaacccgcgagtgcgggcgagaggaatttgtcagattttcagcggtaacacgctgctcatccagcctggaatttcttcggcgggtagggggcgggaaaagaaatatccctgaataacgcgacagtggatcttgcgtagcatctcaaattgctctttggtttcgacgccttccgccacgacggttaaattgaggctttgcccaatgctggtaatggcttcaagtaaggcaaggatgcgtttttcggtcagacaacgatcgacaaaacttttgtcaattttgatttccgttaccggaagactgactaagcgggataatccggaaaagcccgtaccaaaatcatctaccgataagcccacgcccatatcacgcaggatctgaatgcgcttaaagatttcggtatcgtgttccatcatcatgctttccgtgatttctaccgtcagctggtggccgtcaataccccaggcgtgcattgcatcagacacctgattaggcagttgattactgcgaaagtgcagcgccgacaagttcacggataacgccgggatatgaatattctggctacgccattctgctaactgacggcaagcttccgcgatgacccagcgcccaatattttcgatttcaccaatctcttctgcgagaggaataaaccgtgaagggggcacatgaccatgcaggggatcgtgccagcgagcaagggcttcgatgccgtacagttcacccgtttctgcgaagatttgcggctggtaaaccagtttcagttggttattgctaatcgcttctttcagcgctgcgcctaaaaccaaacgctcttttaccatttcgttcatcgccgggctgaagaactgccagccgttaccgccattcttgcgaatataatccattgcattgtgagcagtggagagcaagtaatcgcggtttttacccaggtcgtagctgatgccaatactcaaggtaagcgggaagggtttatcgtcaatcattatcggcttgctgaccacattccgtagctcatcggcgatttgggtaatgttactgacgtcgttttcgaggctcacgaggacaaactgcgtaccttcgatacgacagagatactgatccggtttgagtttttcacgaaagcgattgaccacttccagcaatgcctgatcggcccacgcatagccaaggctatcaatcacatcctgaatatggtcaacaccgatgagatacaccacgggagagacggctttgtcgaccaggtcatcgaggtaattgtgcaggttattgcgatttggcagaccggtcatcggatcaaattggatgagttgttcaatatgctgacggcttttttcctgttccagcgccagcgcggccatatgctggctgatatctgccacgcgttcgataaaggcgctggtttctgctcctgacgaggttttaatttgcaggatccccgcaggcgcgccatcacgctgacgaatggtcgctgaccagctttgcgcattttgaatttctgcaccgtgggaagatgacgcccagtgtatcggcatcccgttgcgcagtgcgaacagcgaaacatgcgattcgttgagtacagattcgatgttacgacaaatgatttcccccatttcatgaaatggcgggctgctgcacatggcggcgagaatattgccttcaagctggcgaatctgccgttcttcggtgatatccgagaaagtcattaccaggttctgcagatgcgcgagcacgtcataaaccgggctgatagaggctttaatccagattttttcaccggtgcgcgtcaacagcagaaattcgtcctgatcgcgggcggttttccatagcaactgttgtaaacgaatgcggttatcggcagggaattcaggaatgttcaggagtgtatcgggctgcataccgctggcttcgctaatgcagtaaccaaacatttcggtaaatgcgcgattgcactgcacaatatggcgttccggatcgaggacaatcaccggtcggtcgagatggtcaacggcaataatcaattgtcgggtctgttctttttgcgccatttctacgctggcatcccgtaccagcgccaggtaataaactttcccctcggcgctcactttcgatagcgcaaaacgggtccagattttactgccgtcttttttctccagctgcagctcccgactcatcccctcaacacgcgctttaccgccttcacggttgtgacgaatgtattcaggatgcgcaggacgcaaatcccgcggaatcagcatatcaatgttattgccaatgacttcttcacgtttgtatccccagagcttctctgcggcggggttgaaaaacatcacttcatcattttcgttaattaacaccgcacccatcatattttgctcaagggcggggaaaaaaatgccatcggcggcattatccgcatcggttagcttcatgattacctctgcatcctggcgcatctaaagactggctttccagagttcaacacggtttctacctcgtcttttggcgatatacagagcttcatcggctatttgaatgaggcgctcatagtcaggatgaccattaaacatggcggcaccgatggaaagtgagagggcaatatcttcgccgtttgcggctttcagtttggttttctccacccgactgcgaatacgttctgcggtacgtaacgtttcgttttcagaagcttcagtcaaaacaatgataaattcatcgcccccgtagcggaaaacataatcactactgcggacgttgtcataaaaggcctgagagactttacgcagaatttcatcaccagtgttatggccccacgtatcgttgatctctttgaatttatcaacgtcaataatcagcactgacagcggtgtaccggtccggttggcatgggcaatttcgcgtttgaagatagtcggtaggaaacggcggttaagtaatttcgtcagtacatccataccgacttcgtggcgcgatacttcttcaaacaattcacgcagcaaggtaataatttgcgatacggtatttcttatctgtaataaaaatttcacccgcagacttctgttattcaaatttctggtgttacgcatggtttgattgaaaataccgtcgaaatcctgaatcagacgggagatatggcctacttcggcaataccactaaaataatgtcgacctttatggttaaaccacaggccaaaatcagcctggcttaaaggcaaactactgcctaaatcagaatccagcaggattttatagataatatctatttcccatgaaagtattgaggctatttgccgttctttttcttcttcggcgttttccagtaacgagaagatacgatagttttcatcttcctttgaggcactactgtcactaaaggtaaacgcgcgagtcatcacttccatcgcgatatcaatactgttaatcgagaaatggtagacctgaagtttttctgcggcggaataatccgaagagaagatcaccggatagaggatttttttcagcacccgaaaccccatctcgacaatttctaccggaattcctatgcgggcatgcacttccgcgacggtatgctggatttgtattagcctttcgacatcgtcaacctgggcagaaagcacgttaataatccagcgttccatcgcactcttcaactgccgctcaacttgttcattactcaagaattcttcggcatgcgggtcgatgcggacaattcgataaaactcgatactcagataatgagcatgcgcaacggcaatttccgcggctttagcacgaatgggcggatctgcctgttcgacaagtccggtccactcatctttcattcttttaaaatacatctccataattcacacccttataaggctgggaaatcagacggaatcaaaatgaaacgcaacgtgcgagatcgactaactgcaccatattctcctgaaatatgaagatatactgaaaagaaataagcgatttaggacagtttcaatctacgctactgttcttcagaagagtatagcccatcgtaattatttttcggtgacagcgaatatcgtatggtttttcatattcatacatttttattagggatttatggctgtttaactaagtgtggttaatttgacttaagtaagcatgattattagtgggatagtttaagagggtaacaagccggtgggtaaagcaccggcttgttacaaagtaagaatgggagtttaactgccccagcgactttgcagatagctgaccgcttgttgagtctgcggtttattcagatagtcctcacggaacaagatggtgccgctaatttcgggcacagcatcgttaagatcgagctgctttttcagttccggtacgccgccgttaatcatccagtctggctctatctttgaaggttcacccactttatagaaggcgataccgatatacaggcgggtcctggtcggtttaacgacatccgcccaccattttgccaacacgtcataacgcgcggcactccgtgagaacggccagtaaatttggggagcaatgtaatccagcaatccttgttccacccatcgacgggtgtcagcgtaggattcgtcataggctgccgcgcctcgggtatcggaaccgagcggatcgtgtgatcggttacgccacacgcctgccgggctaacaccaaattcgactcccggcttaatgcttttaatggtgtgcgatacctttgcaattaactgctgagtattgttgcgccgccagtctgcttttgacgcaaatgcgcctccgtatttacggtacgtttcgttatcatttagccgtgaacccggtgactccgtatagaaatagtcgtcaaactgcacgccatctacgggatagcgggaaaccacttctgcgactattgatgtgatccagtcctgaacctcagggatgcccgggtcgaggacaaagcgatcgccagacgttctgatccagtcgcggtgttgcacatagacgctcgccggttgttgagacagagtgctattcagttccctgatagtaccgggcttcgtattaaccgatacgcgataggggttaaaccaggcgtgtactttcatcccacgcttgtgggcttcgtcgagcataaattgcagcggatcgtaacccggattttcaccaatcttaccggtcataagatcggaccacggcaaaattttcgatggccacagggcggtaccgtccggcttgacctggaaaaagaccgtgtttatgccgagacgttgcagatgatccagtttgtcgatcatcgcctgttgttgtacacgggcccggctggtggggttactaatgttaaccgaggaaaccggtggccagtcgagccgagaaaccgtggccagccagatgccacgcatcggttgtgacgattgttgcgtcgtggctggtggctttgaacctgctggtggtgtcaccatggactctggaggcgtgcttttacaactacacagtaaaagtgccagtgcaactagtatcgctggtcttctaatcgttaatttcttgtttcgggagcagatatccatatgtgctggtttccggtaaacagatgtgcgctcattctcgtacttatccccgttaagtcaatacgacagcaagcacgaaaaagggagcgatgaattatcgctcccttgtcttataaccattcagacatggttagtgtttcttgtcattcatcacaatatagtgtggtgaacgtgcacgcgggtgcaggaagaagtgaccttttggtgcgttctgactgttgattggctccagagtgacgccggtatttgctttgcctttacgatcatgaacagcatagagaataaagggcagggcaagtaccaccaggaaactaacaaccagtaattcaacatacatatcggtagaatcaccctggatgttatccggcggcaggaaggaaacaataaacgccataattgaagtcagcagaccgacaattgccacgaccagtttcacccctttaccaccagggatattaaatgtgcgttttaagtcaggatgtttaagaaccaacacaatgtagccaataaacagcatgaaataagcacacagataaatcaccaccgtcagcgccagtgcgatcaggaaggacatgttgttaccgccaccggtattggtgaggatgatcaacgcgatagacgtaatcaccagctgcgaaatgaccagcgttaccggtacgccatttttgttcattttagcgaatgccgctggcagcaggtttttctgcgctgttacatacatcccgcgagaaggaccaacaatccaggaggcgatttccgccagaacacccagcaacagcagtgcggagatcacgcgaaccgtccactcaatttctggtgccacatgggacatcagaacggtaaaggtttgcattacccctgcggagaggttgatttcattacccggaatgaccatcgcaatagacaaaccaccaacagagcttaagcagattgccgccaccatcagcagtaacatagccaacggatagtcgcgccctgggttgctcatttcattgacgtgggttgcggatgcttctacgcccatataactcaaaatgaaggcaacaaatactaccagggtgcccactttagagaagtcagggaagaaggtcttcgaatccatttcgatagcaacgggggcaccggagtgcagataaatagccgctaatgcgatcaaaataaatgcaggtaacaggataccggcgaagaagccaactttagcaattcgcgccgtgtatttcgtgccaccaaactgcgttaatgccagcgcccaaagaatgatgagtgctgcaatagttttggtaatggggtcttcattcagcgctggccatttcaggatgtaggagagtgcccctaacacgaaatagagcatcggaataaaaccaatggcgatttgcagatagccaaatgagatcgctgcaaatccccatctcggccccagagtatttgatacccaggcgaagacaccaccttcttcccagccgtcgacggtggccatttccgcagcacaaagtcccacgggaataaaccataaaatcccgcctaatagcaggaagaagactaatgaaaagcccgatgttgcgaaggtagggtattcataaacagccattaccatcgatgccgttatggcaaagaatccaagtaatgtgagctgcttagctttacctgtctgtactgatgtagccatattatccccctaaaacggtattcctgtcggaaccgcacctgttttgttctgaagcgtattcagaacaatattttccgttgctaatgccagtgaacagactttggaaattgtcccgaaacgggttcgtttcgggacaccgttaccgttaaacgttatcaggtatgtttaaagctgttctgttgggcaataccctgcagtttcgggtgatcgctgagatatttcagggaggctttgtagtcttccagcaacagttcagcaaagtccatttcgaagccgcgacgacacataatgcgcatcaccacgatgtcggtggcttcaccgccgagagtgaaggccggaacctgccagccgcgcagacgcagacgttcagagaggtcatacagggtgtatcccggatcttcaccatctttcagtttgaagcaaaccgccgggatgccttcgtccgggcgacccgtacagatgaactcatacggccccagtttggcgatttcatccgccagataagcggcaacctggtaagaggcgttctgtactttggtatagccttcacgaccgaggcgcaggaattcatagtactgtgcaattacctgacccgccgggcgggagaagttgatggcaaaagtaccaatttgaccacccaggtagtcaacgttgaacaccagttcctgcggcagcgcttcttcgtcacgccagataacccagccgcagcccagcggagccagaccgaatttatggcctgaagcactgatcgatttcacacgcggcaggcggaagtcccagacgatatccggggcgacgaacggtgccaggaagccaccgctggcagcgtcgatgtgcatgtcgatgtcgataccggtatcggcctggaatttatccagcgcatcgtgcagcggttgtgggaactcatagttaccagtgtaggtcacgccgaaagtcggcaccacgccgatggtgttttcgtcacaggcttcaatcatgcgtttcgggtccataaacaactgaccggggcgcatagggatctcacgcagctccacatcccagtagcgggcgaatttatgccagcagatttgtaccggaccgcacaccaggtttggtttatccgttggtttgcctgcagcttccatacgcttgcgccaacgccatttcatcgccatcccgccgagcatacaggcctcggaagaaccaatggtgttggtgccaacggcctgaccatttttcggcgcaggcgcatgccacagatcggcaaccatatttacgcaacgcaggtcgatggctgcggattgcggatattcttctttgtcgatccagtttttgttaatggataaatccatcaatttgtggacattttcgtcgtcccaggtctggcagaaagtggccaggttctgacgagcgttgccatcaagatataattcgtcattgataatctggaatgcgacatcgtcgcgcatttcgtgcagcggaaaacgttttgattctgcgatagtggaaatagacttcgcaccaaaacgtgaatcgagtagttccgaccttaaatccgttacttgcttcttatccattttaaactccttaaaatgattggatcgcattaaaaaagtaggatttatcgataaagtaagcaagtgcaaaggactcgtgtttaaataacaaaatcctaatgttatttatcgtgagatattacgcgaataatattttttcattgaaaaacaatacaatatgaaattcttgggtggtggtaaggtgttttatgctgttatttttatgcgcattctgtgtctcctgaattatcacgtaaaaatcagaccttaaaatatcactattagtacttgattattattttgaacgcatttataaaattattacataaaaatagcgaatattgctaaaatccccgccaacgatgtgttgacggggctgttattattttggcaataatactccggtataagtatttaccggatgagaaagatattgtttaacggcagtgttaacattctctaccgtcatttgtttcaacaattgctcctgctcagtccatgctgcaggatcgtcatattgaataagactatttacaatagtgttcgctaattgttgaacgctacgctgttggatatcgaggctgcgctgaacgttttgctggtattcattcagttcttgctcactgatccctttagccagacgcttaaccatcacttcattcgctaacgttaacagttcatcatgtcgttctggttgacaagtaaaagccagcaaatgactgatatctttggcctgaggatcaaccgagaggcgagaagaaacgctgtatgctccagatgcctgttcacgaatattaacacgtagatcttttgccagtgcgacgttaaaagcatcgagcgccatacgcgtcggcagattaacaggtgtccgggaatcataacgcttccactgtgaaacctgtgccacaggttcattttgttcttttacagtaaccgatgcgttgtccgtcgcgcgagttaatggtttacctgcggctaatggcgaatcagagtgtttgattgatcctaagtaacgcgtaattaacgccacgagtttgtcttctgcgacattaccgacaatgacaaacgtgatatccgctggagatgaaaacaattggcgatcggcagccagcgcatctgcggcagtaaactgtgcaatctgattttcttgcagtaatttcgtgcggtcatcagcatagcgcgtctcatacatctgctgggcgaatttctccgctggacgctggtcgagcgttttcaacgcctgaatttgagcattttgtagcgatgcccaaatattatcgttaatcgtgctgtgggtgattcgctggttaatcaactgaaaaccaggttcagggttattagtccgcgcgctaacggagagcaacgtattcatgccactgactttactgctcatggttaccgaattttccgcactccagcgtttcaggctggaagaggagagttcgccaacgccgcttccgctaactgctttatttgccagcgcgataagtgatttttgctgcgcagggaaacttaaatcgcctttattcgatacggcaataatttgtagcttttgctcttcacccgcggattttgccagaataaccctggcaccattggaaagtgttaatgatgtcagattctccgccagcgtttctttgctgctaatttccgcctgtgggtctgcgtctactgttaacgataaatttctgcctgggaagacgtaagccgccagctttttgttggcgtactccttttccagcgccaggatagccgcaggagacaatgcttttttggcggcaacctcattgtttaccatttgctcccaaaatgcgtcctggttctttcttaactgctgccatttttccgccagactttgcacggtaatttgctgccacagacgtttcgaaagttgatatgtctcttccggcgacaagaacggcgtattatttaatgagctggatgccaggcgactggtcagcatacgtaaatcacgttcagcttgctgatcaaccgcatttttcagccaggtgaggcgggtagatttgacatcatcgagttcttcagcagaaaaaccatgctgatcaatggttgccaactctgccattaatgcattcgcagcatcctgcatattatcgtctcgtgcatttacacggaaaaacagcgactgataatcgggtgcaattttaacgctgcgcgcagtgccgccagaaatagtcttcaactcgcccgactgtatgcgttcctgcagacgttgattgaacagctgaactaacatgctccattcagcttgttcgataaagctttgctcatcgttcacttgtaccattggcaggcgataatagagtgcgatgccgttcacccggttttctttatcattaatgatattaaagcgcaggtggttttcggcttttgtcggccagacgcgattttcagctgctttgttagccggaagcttacttaaattatcctttatcagcgccagcgcttctttactgtcgatatcgccgaccacgataaaggtcatattatttggttgataccagcgttgataaaattggcgcaattgtgccggtgtgaccgtggcgacagtatccatcaggccgataggttcacggtctaaattacgggtatttgccagcaggaaagggcggcgcgcctgagaggtgcgccatttcgcatcctgatgggcacgccattcctcagtaattacgccacgttcagcgtctacttcgagtttttcaaaggttgcggcattactccattcactgaagattgccatcacttgttgcagattttgtttctgcgtagtcggcaaactcacctgatacaccgtttcgtcatagctggtataggcattaacatcgcgaccaaaacgcaggcccattgactcaaatgtttcgatgactttattacccggccatgtttttgtgccgttaaacatcatatgttctacaaaatgagccacgccgagctcattgtcttcttcctgcaatgaaccggtatgaatttgcagccataaatttacctgatcctttggatgagcatgcggataaatcatatatcgcaagccattgtccagttgcccggtaattaacttttcatcctgcggtaaggcggcggcaatcagccgcccggggagcaacagagttgccactaacgtcagtaagaaacagaggtttctcataattatctccatgcgaaaaccgggcgaatttacccggttaagtaaaatccgaactattaaaatttcatgctgacatcaagccagaaagtacggccactggcgtaggtcgccacaccggtgttcgttgtatcaacagcggttttgctatccagtacattgagaatatcggcactgatcgtcaggttttgttgttgcagaaattgtggcgtccaggacaagcgggtgtcccaggtcaggctgctatccagtttttcgtcaacatactgcttgtaatctgaatattcgctgatgtattgcgcatttgtcttaccaaggataatgcgagctttacgcgcttcttgccaggccagcgtattcgcccacactaacccgctcggttgatgcgtgaaatccatgtttaaggagatctttaatgggttattaaaatctgccactggaacgctatcgtaagagaccagattaccgttataaaccacctggttatcaccggtattgctctcctcataaccattgtttaacgacaagttgcccttgctcttgatatagctaaagacaatttgtgggttaatatctacctggcggatatgcaggggttcggccagttcaaaactgaggctgaacgaatgcgttttggttttgccatcgttgttatattcagtaatggtggttttagtcgcgctgtcggtacgactgcttttgctgatttgatcatgcgcttcacggtaaacatagtttgcacgcgcaataacgttcttaccgattttctgctgcaatcccattgccagttcatcgttataaggcgttttcaaatcctgataacgcgtcagagttttattacctgataccgattccgtccagctattgcggatatcacgtaatcccatatcaagaatattcccgccatagtaacggttataacctgctgtaatcattgaggtttgattagcaaaaatatcccattccgtcataaagcgcggggagatattgtggtttgacagatagttgtcatagtcataccgcacgccgggcattaatgacacattacgccagctaatgcgatccgccatatacagcgtgtagttgtcaattcccaggcggcctttacctttatggtaaatggtatggttagttttctttccggcagcattaatcacataggattcagactggttatggcgttcagtccacgcatcggaatagatgtattccgcgccgaagtagggttgatgcgaaacattacccacggcgaatttttgccagtccaggcgtgttttgaaggtgtaattatctacagcctgggaaatgtgtcctaatccgccacgggtgcaacgccctgtaatatcaccatatgtacatgaaagttcggtgtaccagatgtcatgatcgtgacgggtataatcactaatatgatcccaaccaacggtggtacgcagtttggcccatgcgagctgcgtatccatatcccatgccagaccataggatttattacccatttcgcgatcagactgcgggaaggtgctggtattataatcacggctggagccggtatattttaaggttaaatcgtgggtaaagcggtcgctggcaaaccaggtaaatttgcttaatgcagtatcgataacgtttttatactgtgcccgaccggcgacaatgccgtcattcgaaacataatccgcgcgggtgatatcagactggcggcgcgataaaccggcggtaacgccgaagttatcagcgagttcctgattaaacgacaaggtataaaagttctttttaaaatctggggagtaataagtacttcctgaagagccttgattaaatgcgctcttgttattctcatcgatatgcgatgttaaccagtccgaacgcgtagtgcgataacccaatttcaccttgctatcatcagcgttgaagcgtttgatctttgcatcaattaccccgccattgaagcgaccaaattcaaccggcacaaaactgtcataaagcgtcacattgtccagtaagctgacatcaagataatacccctgtgacatcccgctaatattggttgcactactggcatcggactcattcgctgggttcaggttattagttgcactaataccgtcaatcaaataggcattctggtagggcgacgcaccgtgaatagagattttctcagggcgaatatctccctggttcaacgaggtactttgcgttgaatccatgcgtaccgcagggttggttctcagcagatcgctgatattgccattcccggtcggtaaacgctcgatgctttcactggtgtaatgcgtgttgccgtttacgggtacagggacaggagcatagaccgtcatctcttcaaaaaaatgcatgtacatgtttttgtcatcgacggcctgcgccacatcagcgccacataaaatgacgccaggaataagaactcgcttcatttatttatatctccgtacagcagggcttttattgtttttataaaaccgcgctaatgtcacaaatatcatcggccaggttccagacaccgggttgatgtgtaaccataatgacgccgcttgtgggtagtttttcacgcactaaacgcagtaagcggatagcctcttgttcctcaagatgagaggtagtttcgtcaagaaatatccatttcggacgtcgtaaaattaatcgtgccagggcgatacgttgtttttcgccgctggaaagaatatctccccagcgatcgtggtcatgaatacgcgcagccaatttcccaagaccaacctgatgcagtacttcgctcaacgatttatcgtctacgggcaggggaagtgctttacaaataatctctttcagtaagccggttttgattaacggtgtttgtgacacataccaactgtcagcaggagaagaaatatcacctttaaaccacggccagcagtgggataatgttttaagcagtgtggtttttcccgcgccagagtagcctttcagtaatagccatttgcctggcgaaacatgaaagttcaggttctctaatatgatcttattatcaggcgtacgaatactcgcatcagccacttgtaccgcatgttggcaatttttaggcttattcgtagggcgctgttcagtgagttgatggaactcatacaagcgatcgataaccgcagccagttcagcaagttcgtcatatttataaataaaccagcttaaattgttcgataccagcataaatgcctggcgcgatttcatcagtccgcccagattgatctgcccgctaataaactgcggcaataacagaaagtagggaagaacgctaagcgagcgcgaataaatattctgccagtaatcaagccaccgctgacgattcattaaacgatgccagttctctttaatggtatgaaaattgtcgctcaactcctggcgttgtagagactcagcattgcttagcgcaatcagttctgcctgcttattatgctgcacaagatttgttcgaaatgtcgcttcgctacgttgtttttccacattaagcggacgaatacgtttacccaccttatgggtaaataaagttccaccgatcacaatgagcacgacggtatagaccatatacccctggatattccattctgttccaccaacagtgaatgagagcgtacccgcgctttcccaaagaataacggtaaaggtgatcagcatgctaagtgactggatgaagccaaatgaaagactgagcgttttgctgatcagtaagagaatgtcttcagcgatacgttggtcagggttatctgtatttttatgctcgccgtagatctgcgtgaagtagtagtttttatctgcaaaccaccgattaaggtagtaatctgttaaccattcgcgccagcgaatagtcagtagtttaattaaccatgttttgtttacggatattaatacaaagatccccagcagggcagggaaccaaaggacaagctgccaaagcttatcggtttctttctggcttagcgcattgaaaaaatcattattccagtcgtttaaccagacctgaattttaaccacgccaaggatcatggcgaggataataatgattaacaacactgaagttttattattcttacgcagccaaaagggcttcaacagacagagatactttgctatcaacatacgaagcgtaatgggaatggttatcattagcgaaaattgattgtgccatccaatgattatctatggcaatgatttactgatgaaatttatttaagtatcatttaacaatatgaaatataaaggaatatttcattttcagtggttatggttatgctattgataatcaaggatattgctaatgccctgatgcataccacgtaagccaggattttcgcaagggaagatgatgatgacgaaacacccgacaggaatttatgtcgggtgccttgttaaggtcataagaaggaggctaagaatggagttaaaagagagcgttattaattattctccatttgttttgcaacatccataatgtggtaaagcggtactctgttcttagctaactctaccatggcgttcatataaggtaccatggttgaaaaaaggattttataaccttcgcaaaaataagaaacagtctcattgtttactttagtaatacgatgcttaggacaaccgccattgcagataggtttatatgcacattgctgacatttcgctggaatccgttttttttgcgctgtcagttgtacactgttcatcgttttgagttcagatttattaatgtttccaattttgtactgtggatagacaaaatggtcgcattcgtaaatgtctccattactttcaacaaccagattatccttgcaggactcctggaaaatacaactggtatgcccattccccaaaaaacggctgacaaagctttcaaactgacggatgaaaatttcacccacatcgtttttaacccattgcataaaaatggttgacataaacttgccataagccgtgggaggcacagaaaaatcaatgatacggaatgtgttctcactatgaccactgaaatcaatattcggcgtcccggtttctagcaattcgataaattgcatatgtttactgccgatagattttaaaaaatgataaacctcaagagggtaatggacattaacgttattaatgacggttaacgtattaaactctacttgatatgatttcagacgctcgatggctgctatcacttttgcaaaagtaccgttacctgaattactgcgtctgtaacggtcatgtaactcctgggggccatcgatcgagataccaaccagaaattcatgttctttgagaaaggcacaccattcattattcaataaaatgccattcgtttgtaatgcattaaaaatacgtttttggcctgcatagcgttgttgatagtgaataactttacggaaaaaatccaggccagccagagtgggttcaccgccttgccaggtaaaatagacctgattgccagacgctgcgatatattgtttgatgaactctttcagagtgctgtcatccatccatttttcatgagtaaactgcgactctttttcaaggtaaaaacagtaatcacatttgagattacattgaaaactggagggcttggctgtaacgtgcatcgctatctcgctcaataaggcggcggaaaaatccgccgcatgaaggtttagttatttcgcttcgcttagtgctttcttgatattgttaaacttctcctgatttacctcgctaagcggtggctggctgctgtcgataaactctcttaccacgccttgcatctctttaacgacctgcggattggcggcggcaaggttatctttttgctgtagatccgtcagtttgtagagacctaactgattgttttctactgtatagacaagcgaataatcgttatttctcaccgtataagagaattggcttaagtcctcagtgttggggttatgcgggtaatcgtctgactgatggcgaacaaatttgtggtaattatcccagaatggaatattttcctcgtcaaaccagtgagaataagaggttatccaggtcagatttttatgtggctcgccttgtttcttatcttgcaaccagggcagcaaggaaacgccatccagcttaaggtcttttggaatgctgatatcggctgcatcaagagctgtcgggtagaaatccattgcggaaatcagcttgtcataattaccgggttgaagttttcctttccaccacataaacattggggtgtgagtaccgccaggataggtctgactcttatagcctttttgcgccccgttcagcggcagaggaccatcgataaccgcaccattatcggaggtaaagagaataattgtattgtcatactgtccgtttttcttcagttgttcgagaatgcgttttacaccctgatcaacagaataaacggaagcgtagtagttatctgctgtttgactaccggtattaaattgcttctgatattgatccggtgcaggattatcatttggcaggtgcggagcattataagccaggtaaagcataaaaggctggtcaagtgttttggcacgatcaacaacgccaattgcctcatcggttaactgatcgctgatataaccttttgcggggacacgttcacgatttttgaacagtgaaggggagttgtaatatgccgttcctgcagcgtggaatcccataaagtaatcaaagccacggttttgaggttgccattcttccgcagaaaatgtggtgaagttgtcatgatagtcacgcgtttgtttatcttccggtaccggcacattactgatttttgacaagtgccatttacctactgctgcagtgtaataaccatgattctggaataattcaggcaagaaagtttctgttagcggaataccatcctgagcatcggtattggaatagacaccaaagcgggcgggagctcgaccggtcattattgcggcgcgggaggggccggaaacaccgtgtgccacatagccgttagtaaaacgtacgccttcatccattaatgaaaggagcgtcggcgttgatttttgtgcagcttcaatggctttatctatccctattttgtaggtatcgacaacttcacgattttccattgtttttgggtcaaaagatcccttatcaaaaggaagttgtccataaccaagatcatccatggtcagtacgataatatttggctttcctttggtactgtattctgtcggcgtaaagtctgagaaagcaacgtttgttttggttgctttcagctttacatcatctgccgcatgagcagcaaatgcagccataccagatgccagtatcaaagatatcgaggtacttacgacacttttctttaatgcagacttcataaatgttcctcttcttattgtacttaattccaaagtaattttacgaagagaaataagtggatgtaagtgaagttagtcacataaagagatagcagatttagctaaaaaaagggaaaaaacagtccataaagcgttgacattactttctgttctattaagtaatttctcgccgataaacaactaatttattgatatttaataaattattgcattttactgacaaaatgcagaattgagatcataaataatcatgcaacaggttatgcaagtgcataaatatgtgatggatgtcacttatttatttcaataaatatatcgcctaaaaacaacgcggggcagggaatggctgccccatttaattcttacgcagcgtgtgtggttgactactcgttagcaaataatcaaatagctaaagcattcatcgtgttgcccgtattcatacccgtgtgactttgacaacggtactccttagaaactctcttcggactgttgccgaaatgtttgcggaacgcataaataaaataagatgtactggcataaccacattgttcggcaattttattgactgaaccttctacgcgtatcaaattttttgcgtgctgcattcttgcatctaaaagaatctgtgagaatgtcgtttgctcttgcttaagttttttcttcaacaggctttcactgatgtacaggcagtcacaaatatctttcagcttccatgggtgcgccggcttcatgttgacaatatttctcactttcccagaaacggatagcacaccgttagttaatagtgtaatgaaacctttgcatgcggcaaaaatagacaggcaagaaaaaagcaaaagttctgaaaaattatgatgattgcgttcttccgagttgagataagcaatcatttcattaagcaatccagtcggtacatttgaagcacgtaaaaacttcgcaggaacaggcaccgtcactgtctggatgttagtgcattgtagatattttttaatggtattttcagtaaatccgatctctttaaaatgccgctcataaggttcaaaatgcgtacgaacagcgttatctaccatcaggatctcgccgtcagagaaggcgtaatctttatctaaaatgttagcgttgaaggcatgatgaataaatataacagaacaaacgagcgacattttatctccttaaaacaataaagtttttatcgatacttttttaacatttcatatttataatttgctgtttgttttcagccttgcaaactattgataatgaaatgtgtaagatctcttgcaatgcgacccatttctgaaatactcagctgatcaattgccgaaaaaatggctatcaacgtaagtgtcagtaataagacaaccacaattgcagacatgatttctttatagttgtctctttgcgtgattttgtttttcactgtggtcgcatgcatttcaaatatgtttatttagcggataacgttaaaaatcgttaatcagtatgcttaatataacaggctggagaaaagaggaaataggactggtgcttcagtactgagcggagtttcttacagctgtaggcagaagtttatatcttatagtatgtagtttaatttaatccatgtgagcaaattgcgaaataatagtcaatgaggaattcttctgctgtgcggatgacagcagaagaaatgagaagaggcattaatttgatggttctaattcaaccggaatacttttatagccaggaatgccacttaatggatcgtggttatcaagtgttagcatgtgattcgattctggaaaataggtcaccagtgagcggtcagccatagggtaaatgaccacttttaatctatccatgcggcgtgagctgcgcttaccgtctggcgtaagcgcaataagattaactctttcgccgttttttacacggcaaattttagcttgtttagcactcataaagaccacatctcgttgaccgaatacccctcgatagcgatcatccataccataaatcgtcgtgttgtactgatcgtggctgcgtactgtcgccatgaccagcttactgttaaacgctgaagagggatcttctaacagccctttgctggtaatgaaattagccttacctgacggcgtcatccagcgcctttcagcagctgcatttatcaggtgaaaaccaccgggatgacggatgcgctggttatagtcggcgaactctggcagcacagcttcaatgtcattgcgaatgcgatcataatcttccaccagatactcccaggctaccacgctctggggtagtgctgcctgcgcgattcccgcgaccactgcacactctgatttcagcattacaccggcgggttttaacacgccacgcgaggcatgaatcatcgacattgaatcctcaacggttaccgcctgcgcaccgtttttttgcatgtcaatctcgctacgtcccaggaccggcagaatatagctatgccgtgcggtcaacagatgagagcggttaagcttagtggctacgtgtaccgccaaatctaattgcgttaacggtacagcgctcgcttcccgatctggcattgccagcgcaaaattgccccccatgcagatcaatgctcgagcctgccccgtacatattgcttgcatgctggcaattgcagcatgtccaggtgcatgaggtggggtgaagccatagcgctcacccagacgagccagaaactctgcagacggtttctcggtgataccgacggttcggtcgccctgtacattagagtgtccacgtagtgggcagatacccgcaccaggcttgccaatgttacctttcatcaacagcagattgaccagttgctgtacgttctgggtaccatgttcgtgctgagtgatccccattccgtaacagataatggtgcgttcggcagcggcatatgcgtcagccagttcggcgatttgtgtctgacttagtccagaaatacgttcgatatctttccactcggaattgagaacgtcacggcgtagctcgtcaaagccgacggtatgcgtttgaataaactcgtcatcaagcaatgaaggccgacctgcggcgcttgcagcatcatcgcgctcaattaacaggcgcatcatccccttgagcaacgccatatcgccaccaatgcgcacgttatagtaggcactggccaactgagtctcagagttcgtcagcatttcaaacgggttttgcggtgcggtaaatcgctccaggccacgttcctgtagaggattgatggcgatcattttcgctccccgtttcactaaagcgcgcaacgaagtcagcatgcgagggtggtttgtaccagggttatgcccaatgcaaatgactaaatcgcacttctcaaagtcttccagcaacacggtccctttacctacaccgatactcgctgccaaacccacgcttgtcggttcatggcacatgttggagcagtcgggaaagttattgctcccgtattcacgggcaaaaagctgataaagaaaggcagcttcattggaagtgcggcccgaagtatagaattcaacctgattgggatcactatagctttgaaggcgtgcgccaatttcgtcgaaagcttgttgccagcttaatggcttgtaacagtcgctgacggcatcatatttcaaaggctgagtgagtcgccccgcagcctcaagctcgtggtctccccaggtaagtaatgattgaaccgtattctcagcaaagaaagaggcgtttacctgcttatccgtgacttcccaggcgattgcttttgcgccgttttcacaaatgtcgaatgacgcactgtgcttaggatctggccatgcacaacccggacagtcaaagccctctggcttattcatgtcaaacatggcaataacatcctggcgtatatccatctgcttacgtactgcattcgctacggatttaacagcaccccaaccacctgcagcaccctggtaggattcaatttttttcttcatctacttatcctgtgtggaaatgaattattaggatttgtaatagcgatgatgcacagtacatacaaagggattatcgccaacatggatatataagagtaggggactactctctttctatttttaatctattatcgttaaacaatagattaaatacgataagttaagcatcatctctcatagtgtttaaattaacatatttttcaatataaaaaataagactctggcttcaattgtgcgcggattttcttacaggtgtaggctaatagccttcacaaaataattatccgcgcaattttcgtgaatggagcgcatagactaaggtcaaaatcacaattattcatagataaaagtgacaccaatgactgactggacggttccggctgaaaccttgtttcctgtttgtccataggttgcgcttaaacccagaggtactttgcttttatttactgtccccagggagacattttctcccgtagccagtatttttccattacgcattagagtgacacccactcccgatgcttttgttgcatcaggtgctgtgttagcaaacacttgtcggctactgtcagtggtggcacccgaaagataaaatgagagcttttgttcgcttgagcaatatacgccaaggggtatttctgcgcttccaggaaagtccgggagatccacggtgacatttcgactatcaacggtgcagccgcctgttggcataacaacattgttatttgaaataatattccacgtaaaattacgcggatttccgcttcctaatgttgcaattttatacatatgaatacgggcaatgacttcccccgcttttatgacaactccaccggccgccccaactggggtaatatagagttttaacggtaatggcatcggtgtcttatcaccaatatccaatacgttggtatttgtcgtcaacgggaaggggtaggtcacattattccagtacagcgatcctttatatgactgtagggagcctgcgaaagctgagccttgtaccaggtttatatgatcagtgtcgtaccagccgccgtaatcattccagcaacttatatgctgagacaagtctacaaccagattctggcccggctgtattacagggtcgagattaacataaacagaggttgtacctgctccaatacttgacccgccatcgacattacaactgaaggcaaaaactttgcctgccattaatagaagataaataccgaacaggacctttatactgattgttttacccatgatatatcctaaggttaaaaattgatttaaaaagaaggctaagaaaatcgaatcgacgttattgccaggtgtagatcacattgattagcgcctcgatcgttccctggcttgcgtttccattcaccgtgatagctcttgccttaagtggaaactgtgcattacgagtgatctcatcaacaataaccgttttgctatcgccattttttaacgcagcatcctggtcatccctcagctctatctgaatattttcggcagtaccttcatttttgtaataacccgtattgtcagttgaacctgtcacgattgccgtcactgcacttgtttcaaccggacaatcggttaatgacaaagtaatattgtgccagccagatgcagaaccaggttgttgcagattgcgcgtataaagatccccgagattaacgttagcttctttggtttgaatagtgcagggtttagcgactacccgaccattaacagtgatagtgacatcggcggcctggagagttgctgtgaataacgcgcaaaacgtagctaacaggaacctcttgtgaagtcttttcatatctgactctgattattgaaattcaagggtaaaggttgccgaagccctcaccagtcccggattgacggacttctgagttgacttcagacgagcggagtaaggcaaaatattgttctgttctggtaccagtgggatccactgcatcccggcatgaagatcattcagtttcaccggacgcatatttgcgtccaatatttctatacccaaaccggaggccgtattgcttccttcatccagtttcaacaaagtattattttctgcatcctcaataccgttaaatgcaacccgaacccccgttgtccctttgctgcattcacttaacgtaatctgaaaagggacggctggacttgtgctaccggtcgttggaaattgtctggcactgtttttttggagatctacggtaaaattaagcgaatccgatgagactgtgcagccataatcgaggacgcgcccgctaatgttttgccatatattattggaatagctgtaattcagcgaagtcgtaatatcaccaaacggcacatttaatccaaatgatatttgctggtcgctgcgtgacgtgttccagtaactttggcgactggcactgaaaaatgtcgtaccgtaatttccaagctgctgagagatgcttatttgttcctgaccacgcttactgtagaacagattaaaataatcaataaattgtgtctgctcattggtgtctccggtaggaggcttgacggtgtaaccactcattcgactgtaggcactgtcggataagttataaaaaccttgcgtagaatagcgatatcctgcgacctggatattggttccacaacaagtttattgctgcacttgttgaagagagtatttgcaaaaacattttatgtcgctaaataacatgacgatttcattatgcatgttatttataaaccgtgactaaacagaatattattgcgaacaagggaagtgtcaggaaaggtcaagagctaccaatggttaatatggctataaatcattagctatggttaatgtttgcttgctgaaactaacaccgaattgctctaaacagataagtgcagggtttattaaagctgtccgacagactttcttaacctggtaatatctctcttgggtgactctccaaacatccgcgaatattcccgactgaaatgggatagctttcgtaaccgacagcataggctgctgtggtgacatcgtaatgttcattcagcatctgtcgcctgacttcattgagacgtagccatttctgataccggagtggactcattcccgcttgatccgtccttaaataagtaacagcaccctctggtgttttcgtatgcagtgtctatgcgacagacactgcgctcttagcatggggcagggaataaccaggctatttctccatgcacaggccaattatgaaagaggagaggcttaagttcttgaaccctgaacgaataacgactaccagaaaagcacttcgcatcactcagacatgatttaacataatatacattatgcgcaccaatataaaccaaggaagaatccagtcgttggcggtcatgattgtcatgctcattaacaatgaccaaaccccatatctcacttactaccgtattctcggcttaaccgtccatgcaacctcaacacattgctttcaactgccgtcaccacgttctccggaaaatctgtcggtaatgaagtcttcacgttatccagtgctgctggaatcattctggcaaagtcactcaggatttcatgcatctgcacttccgggaatctcagcacctttgctgtcgccaaaaaatgtcgcggataaattttatcgattgccgtttttttgcctttggatgcgttaagccccattgccagtttgagatcgctgatgtgtattcccgtaccgccaaggaccggaaatgctgaaatgatgtcgtaaaatggcgtgagtcgataactgccgccagcctgaataaatacggagaagttttttgcatgaccgtccgttgcgccaatcaaccactggaagacctggaatttcataaaatcatagcgatctttcagcgcctcgctggaccccatcaaaaaagccatgatccgcgcgatgcctgggcctccatctgattcatatttcaccgatgaaggtaaaccgaatgtctgacacatatcctcctgtggcaagcgaagtaaaaccgttcgctcagcattccaacgcctgtcaaaacgttcgaccgctaacgcgcgcacatttcccgctttaatgatttctgcgtccggaacattcaacccaagttctttcgccagcagcagacagtaatactcattatcaacgctttggctgagatcgagcgtcgcattgggctgcctgatttcgccaatcggtaatttaatgatgtgcgtcgtcggcgttattcctttcggaatgcaccagtcattgcctattctgagcagtgctgtcttctcctgtgcgccagcaaccgagatgcgaaagtcattttcttctctaatcatgcctagcgggatatctgctttataagccgttaatacttcttcaagtctggcttcagtaagcttttcccatgccattatcggatgcgttacggtttcgtcttcgggtattaacgtcacggcaccaacgctgtctcgccctatttctgacaataaatcaaacggttgtctggatttggcatgataacgtttaacgatccggtcacgtacaatcgggctatcgggtaacaggttatcgaagaagttaaatacggcatcagaggtgatattccccctctgcaatggcagcgaaagtgacaacggtctggcataacggcttgctaaccactccggtgcatacttaaaggtgtgcgcgccgttggctaacttcgttaactcgcctacccgctggttgttcatccaagtgacaagtttaggcattaccactccagattttgctgttctgttgattctggcgaggcatttttcgcgtcgcatagcgtcattgagagttcaagcgactgtaaaatcttaaaaaatgtcgtgagcgtggtattgtcagggttgttttcgaaattggaaatcgtcgcctgcttaataccaatttttttcgccagctcgctctgcgtccagccattttgctggcgaaccagtttcattgcattcgccaattgcgttgggctatagatcttctgaaagctcatcatgtcatacgtccacagcaagtttatccgcttaaggggatattataagttttatcctttagtgaggataagtcaatctggaaacacatcttatccgctctacgggataaacgctgcgatatccgcgatcgcggataaaaaggaggatttaaataaggcgttgatgcgccgtttgaagtcggcaatattaagccgcatgccatctcgacatgcggcttatacggtttaccagctatatttcactcccagcatgccctgagtatcgctatagcctttatcacctagttgcacaccgacattcccccacaggctaaggttgttatttactttcgcctcaaccccggtacgtacttcaccgagattacgcgcaccttcacggcctacggtttgaccattcatcttcacggcgtagactttgctattgttgatccagttcgcttcaatgtaaggctggaactcacgctgtttaccatcgtcacgctggtgatggctgttcaggtaggttttcaccccaagtcgcgtttgcacatttccgtcgccttccgtttcaatgcgcgttccgtctttccgggtatggtcggaatctttcacacccatccaggtgatttgcgcctgtggctggacgtaccaggtattcagcgtcccttcgctgccgctaaatgttcccgcttcaaaggtatacccaccctcaacagaggccgtcacaccgcgagaatcatagtcgtcagcagaacggttatcggaactgacgctgttatcaaaccagttatacagcgcccagctgtcaacataagcgccggtcttattcgcatcgttctgataccaggtcgcgtacagcccagcgctgtaaccgctgatgcgcccatccgatttataacccacacgattactctgagtattactgtgctgattggcgtagcctgccatcacgccaagatgccagcgatcctgcgcgttgctactccactgcgccaaatcgccgcctagctgcaatacatagcggttagcctgagtatttagctgaccgtcaccggcccttgaacgttcgtgccctccgacatgacgcatccacatactgcttgccgacccctgagaatgcagtgaatctgtatactgcggctcacccagacggtcgtgtaaacgatggctaaacagcgagttggctgcggcaatgttgctgatatagcttccggcctccgggcgataaactgatgggccttccggatccacaacagggggattattgatgggatcgggtgtatccgctggcgttacgccgtcccatttactggtcagataccagtttttctcgtcattccccttccctttagccagcgtgtagacgtaagccccagcttcgacagttccggtggtcagcgcgaagttacctgcagaattaccgccaacctcaatgagttcaataccgttgaccgtttgtgcaccgacgccgccaatgttatcaacccgaacgcgagtgttcccttgggtatcgcctttcacgttcatcttatcggtgggcgaattatcgccgcccagcgtcgcgttgaacgtcatcaggccattgtttccggtatagttgccgttaacggtcagtacattccccggtttccccccttcgctattcatttgaaccgtgccgccattctccaggttgccgccgatagtggttttagcgacacgcagtgccccccccaggcataacgttcatatcacctgcagtggtgacatttcccgacatcacaccgctgttatggatattaatgtgttgacttgccatattaatggcagagtcggaaccgaaagcaatttccccccccacgatatccgtcgtaccctgatacgccgcggaatcgttgttaagagtcaggatcccggtacccagttttgtcacatcaccgctaccgctgatactgtgcgtcatcgcccagctacgctcagtggagatggtgagcaggccattattgataacggaagcatcacccaggtttttctgctcgttgacgctgagcgcgctgcctgtatcaatgttgaattgccccacaaagcggctattatcgccatccaactctacatctgtcctggcggttgcgctcacgatacccttcccgcttatgctattacgcagttcgccagtcacgttttttagcgttaacagaccgtcattggcaatatttcctctgcctaacccctgagtattatcgaggctgacttccgcatttgggctaatgctggttaacgcattgtagcgtgcattaagcccctcgatagccagcgttccccctgtaacattcaggtttccgccacctgtcagttcaccctgactgatcccacctttatttaccgtcagcgccccctctttgaacaaaacagtcgaacccatctgcccggtgaatgtctctaccgtctgcgtcgatccattaagatcgacgatggccgcgttgctgatgttcagttcccgggtgttgccaagtgcaccatccgcatcggtacgtaatgtccccatctgaacgtaggttgccccctgatagtcgttctgaccgttggaaagcgaaacctgtcgcaccgtattgattgccagatccccttcaccaccgatttttgccgacatatcggccgttgcgccataggctccgccatgttcggctaacgtcagcttttgcccaccatggatgttcagcgctttcagcccatagttaacgtacaaaccattacctggtgcggtcgtgaggcggaatccataatcaccctcggcgaccaccgttccgttttgcgcaatgtgtaacgttttgtccgcttccacctcgtcgccctgtaaatcacgtaacgttaatgagccacccgacccaataaccgtttgcgccttcaccagttgaacgccgacatggctatcgtcgtgttccagcaaattgagcgtcgtcagagggttattcgccatgggatcattccacggtttaggcacgtcgataagcacgtcgcccgtcccgtttacctgatagttacggcctttccaggtgtagtcacccgcgccgacaaccagcgtatcgacgctgatatatccctccgcgagcgtcgcagcaggaatatccgtatcgaaaatgatggtacctccattcatggccagtccaccaatggattgctctccaacttttaccgatgtggtattttcactgtcagactgcaacatcgcgtgagtaagcgcagcggtgttgtcgcgttccagagtgaaggtactgtctttcagttgggcaacaccggcgaattcagtccctgttgcatgggtaaagccaaacatcttgtcggaggatgacagctgcactcgcatcaagccatcgcctttgagcgcattggtcagcgtgtaatctcctgcactgttcgttgatgcgagaatgtcgagcgtaccggggtttgcaatggttacttcactcgaccccatgcccgttaccccatctgccgtatgagacgcaatggtcaggaggccgtcattgaccagcgttttaccgctataagtattccctgcattgaacaccgtatggcctgcatcatggatcacttttccgtctttatcgtcacctgtaatcagcatatcgacctggtagccggcatcactgttattggtatgattaaagacaaaaacgccttcgccaagaccaaactccactttcgtcgcattggtgataaatccggcatctgccgccgcctcaccgtgagcagcaccaatgtttagcgttcctacagcaggctcaaaaacacctaagtaaacttctccaccttcgacattcagcgtaccgttattcgtcagggttaacgtacccgtaccagatgtccctacgtacatattgaatgtttcaagaagagagttctgcccatccaccctcacgtcgcccttacttttgtcattgagagctatctgtgtatcacgcgctttaactatacctccggtggtaatattcagttcacccgtgcctaatacaccgacctgtagcaattgtgcgttagtagatgatgtctttaaattccagagactgtccgttgaaatattaactatccccttaccggaggcatttcctccgataaatccatagcccgttgaattaagggtggcaccattactgacatttacgataccgctaccaaaattaccgacattgatacccacagtatcgaacgatgatgtcgcatccatcaggttcagtgtgccgataccgcttgctttatcgcccaaaaaagtaatattttgcgatacgaacttaccgccatcgctaatattgaggtttccgacgcccgcaacaccaatggtggtatagacattcttattgacctcccacattccccccgtggtgatgctgacattcccgacgccggtttctccataaccgagtgaacttcctccgttgctgacaacaagcccctgattactgatattcatttcgccgtggccgtcataaccaagattagttccgagattagtgataacggagttcttatccttaacagtaatgttgcctgtgcctgtttctttcatccccgcagtgataattcccgaatctactttgccttcactcgagacattaagttcaccgtcgccagcatcaccgatatagatatagcggaaagcttcgcccgttccgaggaaattccaatgccctttatcggtcacgttgacgacaccgtgggaaccgtcctgaacgcccaccaatgaatattctttgttattaatcagtccattattggaaatattgactgtgccattaccgaaatatccattatagagtctgcgtaccgtgatgacagagtcttgatcctgcacattcagggttccgataccggtggcattgccaccgataatcgtattttcagccgtaaccaaccccccctcgcgaatagtcgcctccccagttccttgattaccaatttgaaattcaattgaggaatcattattttttattagccactcgccacccttttcaacgacaacctggccattactgcccgcctgatagcctaaaatggcgacgattgaactcgtgacgtaacccttatccgtaatatttaatgaacctgtgccatagctacctatttcgaataattcggtcgtcagaacagagtcctctccctcaacattgaccgtcccgacgcctcctgtcgaagaacctaatcttaaatagcctccatcgacgtgacccttctgtttaatattcagcgtccccgttccggattgacccacatttaaaggccttgcattatttccgctatcatacaatcgccaggtgccacccaaaacattaacggtgccctctgagtcctcattagcgccaatgacgctggtagtaatagtggttaaggaggcattaccgccagccaaaatattaagcactccagtgccataccagccaaccaggtaggcatcataagcaacatcagtatcaatattggtaatctgatcattatcaacttccagacttgcaccagacgctgaaccgcttagtgccagcaaaacacccagcgtcaatctactgaatttcgttgtcagtccagaggatttacgcaaattaaccgtcgatgttttacctgccctgcgagttaattccgagcaggcctgaaatacctgtagagtgcaattccatatcacgcgatagattctattcatataaacgctccatatacaaacaatacagccacgaaagagatgagtcgtcagacattaaaaatgaaacttattaaattgtcagagggctgtattgagtgttagttggaggtgggaaggtgtcaatttggctaatttgctaatgctttcgaattgatagattaaaaattgcatagttcttattttatttaaatatgaactatgagttattgttgcttaataagaaaactgtttctttcaataggaaaattatcatcatcatatttaacaaagaatagcactaattgctaaaaatcgaagtttattaaaccccttttgcatccattagtgtctttaggaatattcgctataaaataagggttgtgcttaatgctttaagaaaaatagcaattttcccttgaatatcgtactggtgatggaacgatgaatctgcaagctggcttttaacaagccagctctaaaagaagggaaataagaataactatactcaaaaactaacagccacggtcatcatgatgtggctgtcaatgaaactataacccaggcgctttccataacgacgtcgtcagtccatgatcaaccagccccagctgatcctgataaactgcctgccacttatcgcgtgaatcctgataaagttcatgcttttccgggtctggtgtgtgcgtccgttcccagcgaaccaggcgttctccggtttctgccattgatgaaaaaattccggcaccgacgccagctgcaatggcacatcctaatgcagtggcttctttgaccaccggaatattgacgggtaatcccgagacatcagcgagaatttgactccataatttcccttttgaacctccgcctgcaaagactaacgatgaaggatgaatattcgagaaatcagcaatttgctgcaagttacacgctgatacaatcgccgcattttcttccagcgcacggaacaatgtcgctttgttacatttatccgggtcaatggacaagttaataaaggaaggcgcagcgtgataccaggttttaaagcgcattctgtcggagaagatcggcattacgccccacgacccaggcggcacccgactggccatctcttccagcagcgtataggtgtcgatgcctaaacgttcggcaatcagtttttcttcggcacagaaagcatcgcggaaccagcgcatggtgagtccggtaaaaaagcttatagattcagcttgtaccatgccaggaataacatgaggattaacgcgcacgttcatttctgggtctgtcaccggcgcggctaaatttacaacttgctgccagaatgtgccgccaagaaccgcggtttgtgccggacgcacaacgcctaacccaaggcaaccaagctgcacgtcgcctcctccaacgaccaccggagtgcccgccttcagaccgcagagttccgccgcttgtgaacttaccacgcccagcaatgtgccggtttctttgacaggagaaagaatatcggcacgtaggccagccatatccagcaatgcaggtttccagtcacgggtggttagatcaagaagtcccgtggtgccagcgttagagggatccaccgccagttcgccgctgagcatataggccagccagtcgctgatcatggtgatggttgatgcctgacggtaaatatcggaacgatggtgcgccagccaaagtaatctggggatggcacttaaagccagtgtttgtccggtcgcgcgataaacttcgttttcaaaggtattgttgtgcagttctttaagttcgctaacttcgcgtgccgctctggcatccacattggcgcaggcccagatcggggctccttcattattatataaaacaatgccttcacgcatcgaacatgccgaaacggcagcgatatactccggggctatgccggcgttgtgcagcgcctggcgcatacactcacacgccagttgccagtttttgttgagatcaaattccatagaaccaggaacgtccggtactgccagatgccgccactccgcctgtcccactgctatttgattgccttccaggtcgaatatcacagcccgaatacttccggtgcctgcatccagcgccatcaggtagtactttgattctgaaagggtaaagagtcgagccattagattatcctcggcttatgcgttctgtctgttcctctatacgttctccatcattcccggtaataaggtcatgcaaatttaactacgtaaaatcgccgctgctgtgtcctgatcggtaaccagtgcgttgatataaccgcctttcattgcagcggcaattgcttcggctttattttctccccctgccacgccaacccggacgggtatggtcttcagcgcgcttaaaggtaagccaatcagttcgttatgtattttgatattcgtgacaacgtcaccttttgcatcaaaaaagtagcctaaaatgtcgccaaccgccccttttcggccaatcattaactgttcgccctggctgatataaccggagcgaatgattgtcgcatcgtcctgttgactcacagcaccaatgccgacaatcgccacatccgctgcttgcgcggctaacagaacatctttgacgcaattttcattttttagcgtacgggcaatgtcagcggaggatgcccgcaacggagccggaataatattcacactgcacgccgcgttaagctgcccgattcccgtcatataagaaccgacgccaccggagagcgtgaccaggcgaatttgctgtgacgaaataaaaccacttaagcgttgcagcgtattcatggttgcctcgccaaaaccaatcgccagcatctgttgtggttgaagtaaactcatcaacatatgcgccgcgcctatccccagtcgcccaccgacatcagcatccgcaagcccagggatcacccggacatgttgcagcgaaaactgacgacgtaattgagtttcatattccagacagccttcaaagcgagaattaatctgtacgcgaataatgccggactgatgccctttctccagcaatcgcgacactttcaaacgtgtcaggccgagacgatcgctgatctcgctctgggtcagcccgtcgtgatagtaaaaccacgcgatccgcgcgacctgttcttcttcacacattccctgttctgaaattgccgaatcgttgattgtcataattcattcttcactttgaacatatttaaatctttaatgcaattgttcagttcttgctcatttatatctgtgatggcaaccacagtttgactctacgagcatgaacaaacgcaaccgtgaaaatcaaaatagcataaattgtgatctattcgtcggaaatatgtgcaatgtccacctaaggttatgaacaaattaaaagcagaaatacatttgttcaaaactcacctgcaaaactgaacgggggaaatatgcaaacgagtgatacccgcgcgttaccgctactttgcgcccgctcggtttataaacagtattcaggggtcaatgtcctgaaaggcatcgattttacgttgcatcagggggaggtccacgccctgctcggcggcaatggtgccggtaaatcgacgttaatgaagattattgccggtattacccctgctgatagcggtacgctggagattgagggcaacaactacgtcagattaacgccagttcatgctcatcagctgggtatttatctcgttccccaggaaccgctgcttttcccaagcctgtcgataaaagaaaacatcctgtttgggctggcaaaaaaacagctctccatgcagaaaatgaagaacttgctggcggcgctgggctgccagtttgatctgcatagtctggcaggatcgctggatgtcgccgatcgccaaatggtggaaatcctccgcgggctgatgcgcgactcgcggattctgatcctcgatgaacctaccgcctcgcttacccctgcggaaaccgaacgcttgtttagtcgcttgcaagagctgcttgctactggcgtgggtattgtttttatctcgcataagctgccggaaattcgccagattgccgatcgaattagcgtgatgcgcgacggaaccatcgccttaagcggcaaaaccagcgaactgtctaccgacgacattattcaggccatcaccccagcggtacgggaaaaatcgctctctgccagccaaaaattatggctggagttacctggtaaccgcccacaacatgccgccggaacgccggtgctgacactggaaaatctgaccggcgaaggtttcaggaatgtcagcctgacgctcaatgccggagaaattctgggcctggctgggctggtgggggccggacgcacagaactggccgagacgctctatggtctgcgtactttgcgtggcggacgcattatgctgaatggtaaagagatcaataaattatccactggagaacgtttactgcgcggtctggtttatctgccggaagatcgccagtcatccggactgaatctcgatgcttcgctggcctggaacgtctgcgcccttactcataaccttcgtggattctgggcgaaaaccgcgaaagataatgccaccctggaacgttatcgtcgggcgctgaatattaaattcaaccaaccggaacaagctgcacggacattatccggtggcaaccagcaaaaaatcctcattgccaaatgcttggaagcttcgccgcaagtattgattgtcgatgagccgacgcgcggcgtggatgtctcggcccgtaatgatatctaccagctgttgcgcagcatcgccgcacaaaatgtggctgtgctgcttatctcctccgacctggaagagatcgaactgatggcagatcgtgtgtatgtgatgcatcagggcgaaattacccactctgcactgaccgagcgcgatattaatgtcgagactattatgcgcgttgccttcggcgatagtcagcgtcaggaggcgtcatgctgaagtttattcagaacaaccgtgaaatcacggcactgctggcggtggtgctgctgtttgtattacccggttttctcgaccgccagtatttaagtgtgcaaacgctgaccatggtttatagcagcgcgcaaatcctgatcctgctggcaatgggcgcgacgctggtaatgcttacgcgcaatattgatgtttcagtgggttcgattaccggaatgtgcgcggtgctgttggggatgttactgaacgcaggatattcactacctgttgcttgtgtcgcgactttactgcttggtttgctcgcgggatttttcaacggtgtcctggtcgcgtggctaaagatccctgccattgttgccacccttggcacgttagggttgtacagaggcatcatgttgctgtggactggcggcaaatggattgaagggttacccgccgaactgaaacagctctccgccccgctgctgcttggcgtttcagcaattggttggttgacgataattctggtggcatttatggcctggctgctggcaaagacggcgtttggacgcagtttttatgccacgggcgataatttacagggcgctcgtcaactgggcgttcgtactgaagccattcgcattgtggcattttcgttgaacggctgcatggcggcactggcgggaattgtgtttgcttcgcagattggttttatccccaaccagaccggtaccgggctggagatgaaagcaattgcagcctgcgtgctgggcggcattagtttgctcggtggttccggtgcgatcattggtgcggtactcggcgcatggttcctgacgcagatcgatagcgtactggtgctgttgcgcattccggcatggtggaatgattttatcgcgggtctggttctgctggcggtgctggtgtttgatggacgcctgcgttgtgcgctggaacgtaatctacggcggcaaaaatatgcccgctttatgacgccaccgccatccgttaaacccgcttcgtcaggtaaaaaacgggaggccgcataatgcgtattcgctacggttgggaactggctcttgccgcactgctcgttattgagattgtcgcatttggtgcaattaacccgcgaatgttagatctcaatatgttgctgttcagcaccagtgactttatctgcattggcattgtcgccctaccgctaacgatggtgattgtcagtggcgggatcgatatttcgtttggttcgaccatcggcctctgcgccattgcattgggcgtactgtttcaaagtggtgtgccgatgccgctggcgatactcctgaccttactgctcggcgcattgtgcgggctgatcaacgccggattaattatctataccaaagttaacccgctggtgattacgcttggcacgctgtatctgtttgccggaagcgctctgctgctttccggtatggccggagcgacggggtacgaaggtattggtggattcccgatggcgtttacagatttcgctaacctggatgtgctgggactccccgttccgctgattatcttcctgatatgtctcctcgttttctggctctggctgcataaaacccatgccggacgtaatgtgtttttgattgggcaaagcccgcgcgtggcgctttatagcgcgattccagttaaccgtaccttatgtgcgctctatgccatgacggggctggcgtctgcggtcgccgctgtgctgctggtatcgtattttggttcagcacgttccgatctcggtgcgtcgtttctgatgcccgccatcaccgccgtggtgcttggcggggccaatatttatggtggttccggttccattatcggcaccgccattgcggttttattagtgggatatttgcaacaaggtttgcaaatggcaggagtgccaaatcaggtgtccagcgccctttccggtgcgctacttatcgtcgttgtcgtaggtcgttccgttagcctgcatcgccagcaaattaaagagtggctggcgcgtcgggccaataacccattgccataaaggatatcttcatgacacttcatcgctttaagaaaatcgccttacttagcgctcttggcattgccgcaatctctatgaatgtgcaggccgcagagcgtattgcatttattcccaaactggttggcgtgggattttttaccagcggtggcaacggcgcacaacaagcgggtaaagagctgggcgttgatgtgacctacgacgggccgacagaacccagtgtttctggtcaggtacagttgattaataacttcgtcaatcaaggttataacgccattatcgtttctgcggtttcgcctgatggcttgtgtccggcactgaaacgcgccatgcaacgtggtgtgagagtgctgacctgggactctgatactaaaccggagtgccgctcttactacattaatcagggaacgcccgcccagttaggaggtatgttggtggatatggcggcgcgtcaggtgaataaagacaaagccaaagtcgcgtttttctactcaagccccaccgttacggaccaaaaccagtgggtgaaagaagcgaaagcgaaaatcgccaaagagcatccaggctgggaaattgtcactacgcagtttggctataacgatgccactaaatcgttacaaaccgcagaaggaatattaaaagcgtatagcgatctcgacgccattatcgcccccgatgccaacgccctgcccgctgccgcacaagccgcagaaaacttgaaaaatgacaaagtagcgattgtcggattcagtacgccaaatgtgatgcgcccgtatgtagagcgcggcacggtgaaagaatttggcctgtgggatgtggttcagcaaggcaaaatttcagtgtatgtcgcggatgcattattgaaaaaaggatcaatgaaaacgggcgacaagctggatatcaagggcgtaggtcaggttgaagtctcgccaaacagcgttcagggctatgactacgaagcggatggtaatggcatcgtactgttaccggagcgcgtgatattcaacaaagagaatatcggcaaatacgatttctgatgtgcattacttaaccggagtaagttatggcagatttagacgatattaaagatggtaaagattttcgtaccgatcaaccgcaaaaaaatatcccttttaccctgaaaggttgcggtgcgctggattggggaatgcagtcacgcttatcgcggatatttaatccgaaaacgggtaaaaccgtgatgctggcttttgaccatggttattttcagggaccgactaccggacttgaacgcattgatataaatatcgccccgctgtttgaacatgccgatgtattaatgtgtacgcgcggcattttgcgcagcgtagttccccctgcgaccaataggccggtggtactgcgggcgtcaggtgcgaactctattctggcggaattaagtaatgaagccgtggcgttatcgatggatgacgccgtgcgcctgaacagttgcgcggtggcggcgcaggtttatatcggcagcgaatatgaacatcagtcgatcaaaaatattattcagctggttgatgccggaatgaaagtgggaatgccgaccatggccgtgactggcgtgggcaaagatatggtgcgcgatcagcgttatttctcgctcgcgactcgaatcgccgctgaaatgggggcgcaaattatcaaaacctattatgtcgaaaaaggttttgaacggattgttgccggatgtccggtacccattgttattgctggcggtaaaaaattaccggagcgcgaggcgctggaaatgtgctggcaggctatcgatcagggcgcttctggtgtggatatggggcgtaatattttccagtctgaccatccggtggcgatgatgaaagccgtacaggcggtggttcaccataacgaaacggctgatcgggcatatgaactctatctgagtgaaaaacagtaactgcggatctaaggagaagaattatgcacgtcacactggttgaaattaacgttcatgaagacaaggttgacgagtttatcgaagtttttcgccagaaccacctgggctctgtacaggaagaaggcaatttgcgcttcgatgtcttacaggacccggaagtgaattcgcgcttttatatctacgaagcctataaagatgaagacgcagtggcgttccataaaaccacgccccactacaaaacctgtgtcgcgaaactggaatctttaatgaccgggccgcgtaaaaaacgtctgttcaatggtttgatgccgtgaggcgaatttatcaattttatctacaattggggtaacgcgctgacgggagtaaaaaaatgtctgactggaacccctctttatatctacacttttccgctgaacgatcgcgtccggcggtggagctgcttgccagagtgccgctggaaaatgtcgaatatgttgccgatcttggctgtggcccaggtaacagcaccgcccttctacaacaacgttggcctgcggccaggataacaggcatcgactcgtctccggcgatgattgctgaagcgcgcagtgctttgccagactgccagttcgtggaagcagacatccgcaactggcaaccggtacaggcactcgatctgatttttgctaatgcctcactgcaatggctgcccgaccactacgaattgtttcctcatctggtttctttacttaatccgcagggcgtgctggcagtacagatgccagataactggctggagccgacccatgtgctcatgcgcgaagttgcctgggaacaaaactacccggatcgcgggcgtgagccgttggctggcgttcatgcttactacgatattttgagcgaagccggatgtgaggtcgatatctggcgaaccacctactatcaccagatgccgtcacaccaggcgattatcgattgggtgactgccactggattacgtccgtggttacaggatctgaccgagagcgaacagcagctttttcttaagcgctaccatcagatgctggaagagcagtatccactgcaagagaacggacagatactgctggcatttccgcgtctgtttattgttgcccggcgtatggagtaaatatcacgtcagctggtaatgacgatcgggaagaatttttgctggaatttcggcttcatcgttcatctgtaacaggtcaatttcaatagcgttgcagatggcatccagtggtaaatcattgttttcagtaccgaacggatcttccagttcttccgccagacaatccagcgaaataaaagtgtaggaaatcagcacagagataaaaggcgtcatgtaatgcaggtccacgaccagcgcgaacggcagcatgatacaaaacagataaacggtacgatgcaaaatcagggtgtaggcaaagggaattggcgtataggcaatgcgctcgcatcctgccaggaccgctgaaatatcattaagccgatcgttgaggctaataaacaggatatctgaaagctgtccattgcggcgctgaaccgccaaccattctcccattattaacaagatacggttagctggagagttcgaagccagtacacgctgaagatcttcagtcttgagataatgagccagcacttccgcctgtggctgtttgcgtaatgtcatgcgtaaacagtgggcgaaagcgatttgcagccgggcaaactcccttacacttgccgaatccggcaatgtcgtttttacctcgcgcagtaacgaccgtgaggcaatcatcaactgcccccaaagttttcgcgcttcaacgtaacgggcgtacccggcattattacgaaaaccaagaaaaatggcgatggcgacaccgagaatgctgaacggtgcgagggtgaatttgatgcccagatgcgtgtaccagggcagcatgaaaataacagcgatagaaaagagaaaattgagtagtaagcgcgaggatatcttggataatactgagccgtgccagacaaaaatacggcgcagccagtgttgttgtggacgaacaatcatggttatcttcaggcgtggaaaagtcgccctattaaacgtgattacgatcacattctcaagacgctacttacaaattacctacaagcttacaacattagcaggcgctgcatgtggcacctgttaatgataaaggcatataggatgttgtaactaatatggtgaaataagaaacccggtcgaaaccgggttcagaagtaacggtgttattagcacaacggacgtacagcttcgcgcatccctttttcgagaatcgcatccaggtcattagcaacctgctcgaccagaccaggcacttgcgtcaggtcctgctcccagtggtctttttctgccaaaacaatcgctaccagttcctgggtgccgataacacggtcacgatgctggctccagagttgctgataacgttccagccagtgtgcatcgtcctgtaccggatatgtttcgccgttacgctcaccacgatagaacgcaatcaatgccgctaatgcgaaagtaaggcgcgccggaagtgtgccgtttgccttctgccctgccagcagctgtggcaggatgcgggtgcggaacttggtcataccgttgagcgcgatagacagcagctgatgcttaatgtacgggttacggaaacgcccggtgactgcactggcgaaagattccagttcatcacgaggcaaatccagtaccggaataatttcttcgtagatagctttttcaacgaatgcgcaaatttcagcatcgttcatcgcttcacctacggtatccagccctgcctggaacgccaccggcaccagcgcggtgtgcgcaccgttgaggattgccactttgcgttctttgtacggtttaatatcgtcaacaatcagcacgttgagcggatatttgtccagacgcagttcagtcgctaaggatttcggtccctgaatcacaaacaggtaaaagtgttcagcggtgtcgagaaaaccatcgtgataacccagttcttcttccagtttagccacttcatcgcgcggataaccggtaacgatacggtccaccagcgtagaacagaagctgttagcctgagccagccattgaataaatgcttctggcagtgcccactcttgcgcatagcgcagcaccagttcacgcaacgcgtcgccattgtagtcaatcaactcacacggaatgatgatccaacctttatccagcgcaccgttgaaatggctaaagcgttcgaacagcagacgggtcagttttgccggatagcttaccgctggcgcgtcatcgaatttatcgcccgcatggtagctgatacccgcttcggtggtgttagagaaaacaaagcgcatttccgggttgtgcgccagtttcaggaattcatcgtattcactgtagacgctgatttcacgattaaccgagcgaatcagacgcgcgtcgctgaccgctttccccttctcattcaggccacggataatggtggtgtacagaccatcctgcgtgctcagtgacggcgggaatgaagtttcaatcggacgaacaacgaccacgccagaattcagatcggtgtgctcattcaggagatcgatttgccagtcaacaaaggcgcgcaggaagttaccttcaccaaactgaatgatacgttctggatactgtgcaccgggaaaatcgcgacgatttagtgttttcacaatgggttcccttctgattagtcatacaacctgtttgaattggtacgacaggttagcaaactttaatacgccgaacccctgttttgatcaactcctgatgattaatgagcagttttatgagaaaagtgtggcgcggatcatggtttaatcgaggaaaaacgccttttcctggatcataaagtggtagaacacattgcattcaaatcgcgcgtaatgaataaagatgtcagacaacttcctcaccgtaacgcatagtgctggtacggttgcgcccatctttcttcgagcgatacagacacgtatcggcttcgaccatcaatttattaaagtcatcggtcagcgttaggtacgatgcgcgaccactaccgacgccaatacttaccgtgagataaagcgttttttgttgccaggtgaatggttgcagttcaacgcctttacggattttttccgccattagcagaccatcgacaggattcaccgacggcactgcaacagcaaattcttcgccgcccattcgcgccaccagccccttatcaccgacaatcttctgaatatgccgggcaaacacgcttaacactttatcgccacattcatgtccatagttatcgttaatgcttttgaaatagtcgatatcaagcagcatgacagtcagatgttgtgtctgtttcagcgatggacttttcagcgcctcataaagaccggaccgtgagtaaacctgagtcagaaaatcaaagtcggctcgcagcgcaacttgcttcattagcgaattgatcgctgccacgctaaaagaaaccataattgggcatatcgccatcgtggcaataccgagacgtgcggagaacatttgcggaatggagaacggcgaaccgaccgagatatcaatcaccgaatttgccaccagtacgatttccaccgcaccggtgacaaaggtcaacagacatgttacctgcggcgtatagcgcactgcacaccagattaatgcaggcagcgggaacgccagactccccgctccgccaatgactaccgaggcaataaccgacacaataagcgcgatggcgggcatcatctgttctgctttaaagcgcggcagcactccaggaatagccaacgtcagcatacaaggcacgatcaacacgcccgttgagaattgctcactgaaccagtccgcaagcaaaggccagaaatccagactatcaatactgaccgaaccaagatagcatgttcgctgacagcggcggcaaataaaggtaccctgggaatgctattttgtcgttttccgcaattctcatggctgattcatctgtacaaccagccagtgatagattaccgccacgatataacgttgttgttcttcgcttaacgaaacaccctgcggaatgttatgccacttagccagacaaccgcgacagcaggtcgcggtggcgtgctgagcgataaacaccggatgcccgcgcatgggggtttgcttaccgtcattagccggtaatgccggagcaagacgtttagcgacaaaatccgccgcatgttgttcgatgactggcgcgcctttctccaggcaatactgacgctctttcatgcccagacgaaagcgagagcgaaattttgaacgggataaacgcgcgaagagtggatcgagagactgcattaataaaccgaacgccctaactgtttcgtcaattgttcaagaacggcaatacccgcaagcgagttacctgcatcatccagttccggactccagacagcgatggccatttcatgcggaacaatcgccacaataccgccaccaacgccagatttcgccggtagccccacccgccaggcaaactcccccgcgttctggtacataccactggtcgccatcagcgcgttaatttgccgcgcctgcattggcgtcaccactggttcatcaatatgaatagctttcccctgattagccagaaagacaaacgtccgggccagctctacacagctcattttcagagcgcagtaatgaaagtagttttgcagaacggttgtcacgtcatgatggaaattgccaaacgacttcatcagccaggcgatagccgcatttcgcgcggaatgttcaaattcggaacgcgctaccaccgtatcgtaggaaatatcagacacaccgcttaagccgcgcacgacttccagcatacgttgccgtggtgcgcttaatcgcccttgcaacatatcgcagaccaccagcgcaccggcattaatgaacggattacgcggtataccctgctccatttccagttgcactaaggaattgaacggtgatccagacggatctttgccgacgcgttgccagatttcctcttcggagtaatgacgcatggcgacaacgagactcagcactttggaaatagactgaatggaaaaacgttcttgcgcgtctccggcctgaaaaagctgtccgtcaacggtacagatagcaatccccaatcgggaaccgtctactgtagccagcgccggaatataatccgcgactttaccctgaccaatgagcggccgcacttgccgcaagatgttttctaaaattgcattatccatggcgactgccactttctactcctggaccgcaggtctgaaaagacctgcgagtatatcagagctgaatatgtcgcgtcagatccggtctttccacaccgtctggatattacagaattcgtgtaagccgaaatgggaaagctcacgaccaaagccactctttttcacgccaccaaaggccactcgcgcgtcgctggcacaataaccattgataaacaccccaccgcattccagacgtgccgccatctgtctggcctgtgtttcgtcagtggtaaaaatggtcgctgaaaggccgaactcactatcattagccagttccagtgcatgttctgcatctttcgcaatggtgattgccgcaacggggccaaacatttcttcccgaaacgcggtcatttctggggtaacattcgccagaaccgttggcggatagtagttacctgccccagccatcttttccccgcccagtaacaaacgcgcaccctgcgccagggttttctccacctgatgatgcagctcatcacgtaaatcaaaacgagccattggtccgagagcgttctcttcgtcacggggatcgcccattttcaaggctgccgcagctgccacaaaacgttcggtaaatgccgaagcaattccctcttcgataataaagcgttttgccgctgcacatacctgtccggtattctgataacgtccggctaccgccgctttcaccgccagttccagatcggcatcgttaagcacaataaacggatccgaaccgcccagttccagtacgcattttttcagtgccgctccagcctgtgcgccaatagccgctcccgcacgaacacttccggtcaccgtgacagcagcaatgcgcgagtctttaatcatctgactgacaccgtcgttgtcggcattcagccagccatatacgccttgtgggatacccgcatctttaaacacctgggcaatgagctgtgcacagcccatcacattcggcgcatgtttaagtaagtagccgttacctgcaagaatgatgggaacagcgccacgcatcacctgccataacggaaaattccacggcataatcgccagaatcgtccccaacggtcgatactcaataaccgcctgctgattttccaccagcgtaggttccgccttcagcattgccggaccatgttctgcataccagtcacacaaattcgccgatttcgccacttcagcgcgcgcctggttgattggtttgcccatttcgcgggtgatcatttgcgccatttcttcgctacgagcgcgcagagccttaccgatatcacgcagtttttcagcacgataatctatatttgtctcgcgccagtcgcgaaagcctgctgccgccagctgaagtgcgttttcgatatcgtcagcgccagcccacggcagcacagaaagttgttcacccgtggcaggatttatcgaaattgcatgagttgccggagtaatggtcatcggggtatctcctttatgagtcatggtatgaagatacgcagatttactcttgctttaaaatgaataatattaagccacttattcacgaatcgagaatgctatggatctgacccaactggagatgttcaacgcggttgccgaagctggcagcataacccaggctgcagcaaaagtgcatcgcgtgccgtcgaatctcactacccgtctgcgccagctggaaacagaactgggggttgatctgtttattcgcgagaatcagcgtttacgtctctctcctgccgggcataactttttacgctatagccaacaaattctcgcgttagtggatgaagcgcggagcgttgtcgctggcgatgagccgcaaggtttattttctcttggttcgctggaaagcaccgctgcagtgcgcattccagccacgctggcggaattcaaccgtcgttatcccaaaattcagttttcactttccaccggcccttccggcactatgctggatggtgtactggagggaaaactgaatgcggcgtttattgatggacccattaaccatactgccatcgacgggataccggtataccgcgaggaactgatgatcgtcacgccacaaggatatgcgccagtaacccgtgccagtcaggttaatggcagtaacatttatgccttccgcgccaattgttcgtatcgtcgccacttcgagagctggtttcatgctgacggtgccgctccgggaactatccatgagatggagtcttatcacggaatgttggcctgtgtgatcgcaggagcaggcattgcgcttattccgcgctctatgctggaaagtatgccggggcatcaccaggttgaagcgtggccgttagctgagcaatggcgttggttaacaacctggctggtctggcgtcgtggtgcgaaaacacgtccgctcgaggcatttattcaactgctggatgtgcctgactcggcaagacagggatatcaatgagctatttttgatagttcttgcggttaatatgctctatatagtgatgttccgatgacttatgactatatggggcaaatatggttacgccagtaagcatcagcaattacatatctcttcctgatgattttcccgtacgtaatattgcaccgcaggtaaaagaagttttaaaggattttattgatgcacttagtacaataatatgtaatgaagagtggcgcacgtctttaaacatcaactcagccacaaaaaagatatttaataaccttgacaacttatcatatattcagaggacttcttttcggggtaacgacacgctatacaatgaaaaggttcagtttaaactcacttatcccgccaggaatggaagacacaaagaaaatattgaatttcaggtagtaataaatttaagccctatttatttagataattttcgccatgatggagaaattaatattttttgcgctcccaacccaaagcctgtcactatggggcgcgtatttcagaccggcgtcgagcgtgtactctttctgtttctgaatgattttattgaacaatttccaatgatcaaccctggtgttcccatcaaaagagcgcatacaccacatattgaacccctgccttcggatcaccataccgctgcagattacttacgccagtttgatttgcttgtcctgaattttatctctcgcggtaattttgtcatactcccccgattatggaataactctgaggttcacagatggttcgtcaataaagatcctaacttgatcaccgccattctcgacataacggacagcgaattaaaagaggatttgttgcaaagcctgatggattcattaggttctaacaaacatgtactacccgaagtctgcatctgctttttatcccttttagcagaacaagaatctcctcattttcagaacttgtttttatttttcgccaatatgttattgcactatcaccaatttatgaatcccaatgaaagtgatttgaatgacgtgttgatgccagcatcattaagtgatgataaaattatcaaacatatggcgcgcaggaccctcaaactgtttgtaaaaaatgaaacaccgccaaaagttactcacgaagacctggtgaaaaacaggcctcgctcccctgtcagaccacctatacccgcaaccgccaaaacgccagacctccctgaacgtcattaaaccgtgatgttaccgactctctgacgcgtgaaagaatcagcgtcagagaaacggaaaacgcgatccagatcacaaatgcattgtattcacatcattaaccgttttaagatcatttcatcactttttcgcaactcacccgataatctgttatgacaacaaacactgtttcccgcaaagtggcgtggctacgggtcgttacgctggcagtcgccgccttcatcttcaacaccaccgaatttgtccctgttggcctgctctctgacattgcgcaaagttttcacatgcaaaccgctcaggtcggcatcatgttgaccatttacgcatgggtagtagcgctaatgtcattgccttttatgttaatgaccagtcaggttgaacggcgcaaattactgatctgcctgtttgtggtgtttattgccagccacgtactgtcgtttttgtcgtggagctttaccgttctggtgatcagtcgcattggtgtggcttttgcacatgcgattttctggtcgattacggcgtctctggcgatccgtatggctccggccgggaagcgagcacaggcattgagtttaattgccaccggtacagcactggcgatggtcttaggtttacctctcgggcgcattgtgggccagtatttcggttggcgaatgaccttcttcgcgattggtattggggcgcttatcacccttttgtgcctgattaagttacttcccttactgcccagtgagcattccggttcactgaaaagcctcccgctattgttccgccgcccggcattgatgagcatttatttgttaactgtggtggttgtcaccgcccattacacggcatacagctatatcgagccttttgtacaaaacattgcgggattcagcgccaactttgccacggcattactgttattactcggtggtgcgggcattattggcagcgtgattttcggtaaactgggtaatcagtatgcgtctgcgttggtgagtacggcgattgcgctgttgctggtgtgcctggcattgctgttacctgcggcgaacagtgaaatacacctcggggtgctgagtattttctgggggatcgcgatgatgatcatcgggcttggtatgcaggttaaagtgctggcgctggcaccagatgctaccgacgtcgcgatggcgctattctccggcatatttaatattggaatcggggcgggtgcgttggtaggtaatcaggtgagtttgcactggtcaatgtcgatgattggttatgtgggcgcggtgcctgcttttgccgcgttaatttggtcaatcattatatttcgccgctggccagtgacactcgaagaacagacgcaatagttgaaaggcccattcgggccttttttaatggtacgttttaatgatttccaggatgccgttaataataaactgcacacccatacataccagcaggaatcccatcagacgggagatcgcttcaatgccacccttgcccaccagccgcataattgcgccggagctgcgtaggcttccccacaaaataaccgccaccaggaaaaagatcagcggcggcgcaaccatcagtacccaatcagcgaaggttgaactctgacgcactgtggacgccgagctaataatcatcgctatggttcccggaccggcagtacttggcattgccagcggcacaaaggcaatattggcactgggttcatcttccagctcttccgacttgcttttcgcctccggtgaatcaatcgctttctgttgcggaaagagcatccgaaaaccgataaacgcgacgattaagccgcctgcaattcgcagaccgggaatcgaaatgccaaatgtatccatcaccagttgcccggcgtaatacgccaccatcatgatggcaaatacgtacaccgaggccatcaacgactgacgattacgttcggcactgttcatgttgcctgccaggccaagaaataacgcgacagttgttaatgggttagctaacggcagcaacaccaccagccccaggccaattgctttaaacaaatctaacattggtggttgttatcctgtgtatctgggttatcagcgaaaagtataaggggtaaacaaggataaagtgtcactctttagctagccttgcatcgcattgaacaaaacttgaaccgatttagcaaaacgtggcatcggtcaattcattcatttgacttatacttgcctgggcaatattatcccctgcaactaattacttgccagggcaactaatgtgaaaagtaccagcgatctgttcaatgaaattattccattgggtcgcttaatccatatggttaatcagaagaaagatcgcctgcttaacgagtatctgtctccgctggatattaccgcggcacagtttaaggtgctctgctctatccgctgcgcggcgtgtattactccggttgaactgaaaaaggtattgtcggtcgacctgggagcactgacccgtatgctggatcgcctggtctgtaaaggctgggtggaaaggttgccgaacccgaatgacaagcgcggcgtactggtaaaacttaccaccggcggcgcggcaatatgtgaacaatgccatcaattagttggccaggacctgcaccaagaattaacaaaaaacctgacggcggacgaagtggcaacacttgagtatttgcttaagaaagtcctgccgtaaacaaaaaagaggtatgacgatgtccagacgcaatactgacgctattaccattcatagcattttggactggatcgaggacaacctggaatcgccactgtcactggagaaagtgtcagagcgttcgggttactccaaatggcacctgcaacggatgtttaaaaaagaaaccggtcattcattaggccaatacatccgcagccgtaagatgacggaaatcgcgcaaaagctgaaggaaagtaacgagccgatactctatctggcagaacgatatggcttcgagtcgcaacaaactctgacccgaaccttcaaaaattactttgatgttccgccgcataaataccggatgaccaatatgcagggcgaatcgcgctttttacatccattaaatcattacaacagctagttgaaaacgtgacaacgtcactgaggcaatcatgaaaccactttcatccgcaatagcagctgcgcttattctcttttccgcgcagggcgttgcggaacaaaccacgcagccagttgttacttcttgtgccaatgtcgtggttgttcccccatcgcaggaacacccaccgtttgatttaaatcacatgggtactggcagtgataagtcggatgcgctcggcgtgccctattataatcaacacgctatgtagtttgttctggccccgacatctcggggcttattaacttcccacctttaccgctttacgccaccgcaagccaaatacattgatatacagcccggtcataatgagcaccgcacctaaaaattgcagacccgttaagcgttcatccaacaatagtgccgcacttgccagtcctactacgggcaccagtaacgataacggtgcaacccgccaggtttcatagcgtcccagtaacgtcccccagatcccataaccaacaattgtcgccacaaacgccagatacatcagagacaagatggtggtcatatcgatagtaaccagactgtgaatcatggttgcggaaccatcgagaatcagcgaggcaacaaagaagggaatgattgggattaaagcgctccagattaccagcgacatcaccgccggacgcgttgagtgcgacatgatctttttattgaagatgttgccacacgcccaactaaatgctgccgccagggtcaacataaagccgagcatcgccacatgctgaccgttcagactatcttcgattaacaccagtacgccaaaaatcgctaaggcgatccccgccaattgtttgccatgcagtcgctccccgaaagtaaacgcgccaagcatgatagtaaaaaacgcctgtgcctgtaacaccagcgaagccagtccagcaggcataccgaagttaatggcacaaaaaagaaaagcaaactgcgcaaaactgatggttaatccataccccagcagcaaattcagtggtactttcggtcgtgcgacaaaaaagatagccggaaaagcgaccagcataaagcgcaaaccggccagcatcagcggtggcatgttatgaagccccactttgatgaccacaaaatttagcccccatacgaccactaccagtagcgccaacaccccatcttttcgcgacattctaccgcctctgaatttcatcttttgtaagcaatcaacttagctgaatttacttttctttaacagttgattcgttagtcgccggttacgacggcattaatgcgcaaataagtcgctatacttcggatttttgccatgctatttctttacatctctaaaacaaaacataacgaaacgcactgccggacagacaaatgaacttatccctacgacgctctaccagcgcccttcttgcctcgtcgttgttattaaccatcggacgcggcgctacgctgccatttatgaccatttacttgagtcgccagtacagcctgagtgtcgatctaatcggttatgcgatgacaattgcgctcactattggcgtcgtttttagcctcggttttggtatcctggcggataagttcgacaagaaacgctatatgttactggcaattaccgccttcgccagcggttttattgccattactttagtgaataacgtgacgctggttgtgctcttttttgccctcattaactgcgcctattctgtttttgctaccgtgctgaaagcctggtttgccgacaatctttcgtccaccagcaaaacgaaaatcttctcaatcaactacaccatgctaaacattggctggaccatcggtccgccgctcggcacgctgttggtaatgcagagcatcaatctgcccttctggctggcagctatctgttccgcgtttcccatgcttttcattcaaatttgggtaaagcgcagcgagaaaatcatcgccacggaaacaggcagtgtctggtcgccgaaagttttattacaagataaagcactgttgtggtttacctgctctggttttctggcttcttttgtaagcggcgcatttgcttcatgcatttcacaatatgtgatggtgattgctgatggggattttgccgaaaaggtggtcgcggttgttcttccggtgaatgctgccatggtggttacgttgcaatattccgtgggccgccgacttaacccggctaacatccgcgcgctgatgacagcaggcaccctctgtttcgtcatcggtctggtcggttttattttttccggcaacagcctgctattgtggggtatgtcagctgcggtatttactgtcggtgaaatcatttatgcgccgggcgagtatatgttgattgaccatattgcgccgccagaaatgaaagccagctatttttccgcccagtctttaggctggcttggtgccgcgattaacccattagtgagtggcgtagtgctaaccagcctgccgccttcctcgctgtttgtcatcttagcgttggtgatcattgctgcgtgggtgctgatgttaaaagggattcgagcaagaccgtgggggcagcccgcgctttgttgatttaagtcgaacacaataaagatttaattcagccttcgtttaggttacctctgctaatatctttctcattgagatgaaaattaaggtaagcgaggaaacacaccacaccataaacggaggcaaataatgctgggtaatatgaatgtttttatggccgtactgggaataattttattttctggttttctggccgcgtatttcagccacaaatgggatgactaatgaacggagataatccctcacctaaccggccccttgttacagttgtgtacaaggggcctgatttttatgacggcgaaaaaaaaccgccagtaaaccggcggtgaatgcttgcatggatagatttgtgttttgcttttacgctaacaggcattttcctgcactgataacgaatcgttgacacagtagcatcagttttctcaatgaatgttaaacggagcttaaactcggttaatcacattttgttcgtcaataaacatgcagcgatttcttccggtttgcttaccctcatacattgcccggtccgctcttccaatgaccacatccagaggctcttcaggaaatgcgcgactcacacctgctgtcacggtaatgttgatatgcccttcagaatgtgtgatggcatggttatcgactaactggcaaattctgacacctgcacgacatgcttcttcatcattagccgctttgacaataatgataaattcttcgcccccgtagcgataaaccgtttcgtaatcacgcgtccaactggctaagtaagttgccagggtgcgtaatactacatcgccgattaaatgcccgtaggtatcattaaccaatttaaatcggtcaatatccaacaacattaaataaagattcagaggctcagcgttgcgtaactgatgatcaaaggattcatcaagaacccgacgacccggcaatcccgtcaaaacatccatattgctacggatcgtcagcaaataaattttgtaatcggttaatgccgcagtaaaagaaagcaacccctcctgaaaggcgtcgaaatgcgcgtcctgccagtgattttcaacaatagccagcattaattcccgaccacagttatgcatatgttgatgggcagaatccattagccgaacgtaaggtaattcatcgttatcgagtggccccagatgatcaatccaccgaccaaactggcacagtccataagaatggttatccgttatttctggcttactggcatctctcgcgaccacgctgtgaaacatactcaccagccactggtagtgggcatcgatagccttattgagatttaacaagatggcatcaatttccgttgtcttcttgatcattgccactcctttttcacagttccttgtgcgcgctattctaacgagagaaaagcaaaattacgtcaatattttcatagaaatccgaagttatgagtcatctctgagataacattgtgatttaaaacaaaatcagcggataaaaaagtgtttaattctgtaaattacctctgcattatcgtaaataaaaggatgacaaatagcataacccaataccctaatggcccagtagttcaggccatcaggctaatttatttttatttctgcaaatgagtgacccgaacgacggccggcgcgcttttcttatccagactgccactaatgttgatcatctggtccggctgaacttctcgtccatcaaagacggccgcaggaataacgacattaatttcaccgctcttatcgcgaaaaacgtaacggtcctctcctttgtgagaaatcaaattaccgcgtagtgaaaccgaagcgccatcgtgcatggtttttgcgaaatcaacggtcattttttttgcatcatcggttccgcgatagccatcttctattgcatgaggcggcggtggcgctgcatcctgttttaaaccgccctggtcatctgccaacgcataaggcatgacaagaaaacttgctaatacaatggcctgaaatttcatactaactccttaattgcgtttggtttgacttattaagtctggttgctatttttataattgccaaataagaatattgccaattgttataaggcatttaaaatcagccaactagctgtcaaatatacagagaatttaactcactaaagttaagaagattgaaaagtcttaaacatattttcagaataatcggatttatatgtttgaaaattattatattggacgagcatacagaaaaagcaaatcacctttacatataaaagcgtggacaaaaaacagtgaacattaatagagataaaattgtacaacttgtagataccgatactattgaaaacctgacatccgcgttgagtcaaagacttatcgcggatcaattacgcttaactaccgccgaatcatgcaccggcggtaagttggctagcgccctgtgtgcagctgaagatacacccaaattttacggtgcaggctttgttactttcaccgatcaggcaaagatgaaaatcctcagcgtaagccagcaatctcttgaacgatattctgcggtgagtgagaaagtggcagcagaaatggcaaccggtgccatagagcgtgcggatgctgatgtcagtattgccattaccggctacggcggaccggagggcggtgaagatggtacgccagcgggtaccgtctggtttgcgtggcatattaaaggccagaactacactgcggttatgcattttgctggcgactgcgaaacggtattagctttagcggtgaggtttgccctcgcccagctgctgcaattactgctataaccaggctggcctggcgatatctcaggccagccattggtggtgtttatatgttcaagccacgatgttgcagcatcggcataatcttaggtgccttaccgcgccattgtcgatacaggcgttccagatcttcgctgttacctctggaaaggatcgcctcgcgaaaacgcagcccattttcacgcgttaatccgccctgctcaacaaaccactgataaccatcatcggccaacatttgcgtccacagataagcgtaataacctgcagcatatccgccaccaaaaatatgggcgaaataactgctgcgatagcgtggcggtatagcaggaagatccatattttccgccaccagcgcccgcaattcaaaatcatcgacatcctgcattgcttcgttttcttccaggcaatgccagcgcatatcgagaagtgcggcgctaagcagttcgctcatctcataccctttgttgaacaggctggcattacgcattttctgttgcagttcgtcaggcattgctgccccgctctgataatgccgggcgtagcgagcgaatacctgcggatgcgttgcccagtgttcgttgatttgcgacggaaattcgacaaaatcacgcggcgtgttggtgccggaaagcgtggcataacgctggcgggcaaaaaggccgtgcagcgtatgaccaaattcatggaataaggttatgacatcatcccagagtaacaacgcaggctcaccggcagcgggtttctgataattgcagacgttataaattaccggatgtgttttattaagcgttgattgctcaacaaaattgcccatccatgcaccgccgctttttgaatcacgggcgaagaaatcaccgtaaaataacgccagccccacgccattatgatcaaaaatttcccacacacgaacgtcaggatggtagacaggaatatcaaaacgttcgacaaacttaataccgaagagctgattcgcggtccagaatacaccttcatttaacaccgtgtttaattcaaaatatggcttgagctgcgcctcatcaagatcaaatttctcccgccgtacctgttccgcataaaatgcccagtcccacggctgcgcgctaaacccgccctgctgcttatcgataaccgcctgtatggaggctaattcatcgctcgcacgttgacgcgccgctggaacaatttcccgcataaagttaagtgctgcttcaggtgtttttgccatctgatcggcgattttccatgcggcataatgaggaaaaccaagtagtgttgcctgttgtgcacggatctccaccagacgttgaatgatagcgcgggtatcattggcatcatttttttccgctcgcgtccagcccgcaataaacagtttttcacgcgtcgcacgatcgcgcatttcggcaagcgccggttgttgggtggtattcagcagcggaatcagccatttgttatccagacctttctcgcgagccgcctctgccgccagcgcaatctcttgctcactcattcctgccagctgcgcgatatcgttcacaaccagaccgccggatttatttgctgccagtaatcgctggttaaactggctggtcagggtcgcagcttctgtattcagtacttttaattttgctttatcagcttgcgcaagtttggctccggcaaggacaaaacgttgatgaatcacctccaccaggcggatggattcactatcaagccccagggattcacggcgctgccagacagcatctacccgcgcgaataattcaccgttcagatagatatcattagccagttccgccagttcagcggaaaactgctcgtcaagacgctgtaattcatcattggtatgcgccgcagtcatcgcaaaaaagacgctggtaacgcgggtaagtaattctccgctttgttccagtgccagaatagtattgttgaaatcaggcatttgcgggttaagcgcgatggcagcaatttctgcccgcttttgctgcattccctcatcgaatgccgggcgatagtgatgattggcaatttgatcaaaatggggagccagatacggcagtgtgctttgcacaaggaaaggattcattgttgtcattttcttctcctgaacgcgaggtgttccatagcgtaggcttactgataacggagtgcaatcttgcaatccagtattacccgctcttaagcatcccgtgctatgttattgacacacaaaagcgttgaggaacagtgagatgatcgttttagtaactggagcaacggcaggttttggtgaatgcattactcgtcgttttattcaacaagggcataaagttatcgccactggccgtcgccaggaacggttgcaggagttaaaagacgaactgggagataatctgtatatcgcccaactggacgttcgcaaccgcgccgctattgaagagatgctggcatcgcttcctgccgagtggtgcaatattgatatcctggtaaataatgccggcctggcgttgggcatggagcctgcgcataaagccagcgttgaagactgggaaacgatgattgataccaacaacaaaggcctggtatatatgacgcgcgccgtcttaccgggtatggttgaacgtaatcatggtcatattattaacattggctcaacggcaggtagctggccgtatgccggtggtaacgtttacggtgcgacgaaagcgtttgttcgtcagtttagcctgaatctgcgtacggatctgcatggtacggcggtgcgcgtcaccgacatcgaaccgggtctggtgggtggtaccgagttttccaatgtccgctttaaaggcgatgacggtaaagcagaaaaaacctatcaaaataccgttgcattgacgccagaagatgtcagcgaagccgtctggtgggtgtcaacgctgcctgctcacgtcaatatcaataccctggaaatgatgccggttacccaaagctatgccggactgaatgtccaccgtcagtaatttttatacccggcgtaactgccgggttattgcttgtcacaaaaaagtggtagactcatgcagttaactcactcacaagcaagaacgaatgaccgtcgaaacgcaacttaatcccacacagcctgtcaatcagcagatttatcgtattcttcgtcgcgacattgtccattgcctgattgctccaggcacaccgttgtcggaaaaagaagtttctgttcgtttcaatgtgtcacgccagccggttcgtgaagcctttattaaactggcggaaaacggcctgattcaaattcgtccgcaacgtggcagctacgtcaacaaaatttccatggcccaggtgcgcaacggcagttttatccgtcaggccattgagtgcgcggtggcgcgtcgggcggcgagcatgattaccgaaagccagtgctatcaactggaacaaaatcttcaccagcaacgcattgccattgagcgcaagcaactggatgatttttttgaacttgatgacaacttccatcaactcctgacgcagattgccgactgtcaactggcgtgggataccattgagaacctgaaagcgaccgttgatcgcgtgcgctatatgagtttcgaccacgtttctccaccagaaatgctgttacgccagcatcttgatattttctctgccctgcaaaaacgtgatggcgatgcggtagaacgtgcaatgacgcaacatttgcaggaaatcagcgaatccgtgcgccagatccgccaggaaaacagcgactggtttagcgaagagtaattcatttcctctcatcccatccggggtgagagtcttttcccccgccttatggctcatgcatgcatcaaaaaagatgtgagcttgatcaaaaacaaaaaatatttcactcgacaggagtatttatattgcgcccgttacgtgggcttcgactgtaaatcagaaaggagaaaacacctatgacgacctacgatcgtaaccgtaacgcaatcaccactggcagccgtgttatggttagcggcaccggtcacactggcaagatcctgtcgattgatactgaaggtctgaccgctgagcaaatccgccgcggaaaaaccgtagttgttgaaggttgtgaagagaaactggcaccactggacctgattcgtctcggcatgaactaagcgtgtgaatgccgccgatggcggcattgcttttttacttcacggaatattttgccacggtcgctttcgcgccatgcgctaataaagacaagtacgtttccgtcactcttgcagtaaacaaactattgtctggcaaatcatcaccaaagatcgccttaatcgccagcaatgactggacgcgcgctttcccttcggcactactttgtacagccttctgaataacaggtaacagtgggtcactgatttctatcggatttccctgttcatcaacaccaccgacataacgcatccaacccgcgacgcccagcgccagcagatcgaacttgctgtcatgcgccagatgccagcgaacagaatccaacatccgctgtggcaatttctggctaccatccatcgcaatctgccaggttcgatgacgtaacgccgggttgctatagcgtgcaattaatcggttagcgtaatcttgcaaatcaacgccctgcactttcaacgtcggcgcttgttcctgcaacatcaagccatacgccgcataacgataatgttcatcttccatacagtcattaatgtgctgatatcctgcaagataccccagatacgccaggaatgaatgactgccgttgagcatgcgcaacttcatctcttcataaggcagcacatcgctaaccagttcggctcccgctttttcccattccggacgtccggcaacaaagttatcttctattacccactggcggaaaggttcacaggcaacgcccgcaggatcgcgcacaccggtaagttgttcgattttcgccagcgtatcctctgtcactgcgggcacaatacggtccaccattgttgatgggaaagtcacgttatcttcgatccattgtgccagttttacatcaacggcttgtgcgtaggaagtgacaacgtcacgcataacatgaccgttttctggcatgttgtcacatgacatgacggtaaatgcgggaagtcctgccgctttacggcgagccagcgcctcaacaatcacccctgttgctgttttcggctggtggggattttgcacgtcggcagctaccatcgggtgatcgagcattaactgtccggtcgccggagagtggaaataccctttttcggtgattgtcagagagacaatcgcgatttgcggttcacacatcgctgccaacacggtttctaagccatctatctgtacgtgcaaggcttttttaacgacgccaacgacgcgagccgtccacacatcggccgacatttccgcaacggtataaagattatcttgctgttgtaaatcggcaatttgctgttcgccgccgattaagttgacctcataatatccccagtcactgaaatgttccgtagcaagaatatcggcatacacaccctgatgcgcacggtgaaatgcaccaaagcctaaatgaacaattcttggagccaggttattaagatcataaacagggagtgtcgcttttgctgataacaaattatttcccataacaattccttaaatataaatatggcaagctatatgttttgttatatgaataaaaatcccctctccggtaagagaagggattaagggtttacagacttctggaaggttgcgcagctcttacaacacgcggttgatcttccgcagcgtcttccagcgcacttaaatcacggtctttcacctctggcattttcagcgcagagattaaaccaatcactgaatatgccatgatcataatggcgatcggataccaggattccgtcatggtgcagaaaatacccgccaggataggaccaaaaccggaagcgataagaccaccaatttctttagaaatagccatccgggtaaagcggtttttacagccgaacatttctgccatggtaatgttttccagagcaaataatcccagcaccgcacagttatgaatcacaatcagtgcaaccataatggtgctcggggcatagcttttatctacaatgatagaaagcattggccatgccagcacaatcgcggaggtattcataataatatacgggatccggcgaccaattttatcggataaccaaccaaggaacggaatggtcataaagccgagaatcgaactgatcatcaatgcatctgttggaattgctttgttaaacaataacgtctgcactaaatagcctgcaaggaaagtctgaattaacccggagttacccgcctgaccaaaacgcagccctgttgccagccagaaggatttgctctggaacatgctaccagcaggtgcaggttttgctgtcggttggttactgtcgttaaccttctcaaagaccgggctttctttcagattcatacgcaaccagatagcaaagaccatcacgacaacactcgccaggaacggtatacgccatccccacgccagcagttcctctttactgagaatgaagaacataaaggcccagattgccgttgcgctcaaggttccgcagttagttcccatagccacaaatgaggagataattccgcgcttaccttttggcgcatattccgccagcatcgtaccggcaccggaaatttccgcacctgcacccaacccctgaataatacgcaacgtcaccagcaagatgggtgcaaaaacaccaatctgtgcataggtcggtaacacaccaattaaggtggtacagatccccatcatggtgatggtaataaagagcacttttttacgccctattctgtcgcccattttgccgaaaataaatgctccgacaatacgcgccacataacctgcaccgtaggttcccattgccagaattaacgccattgccgttgatgattcaggaaaaaatatttcatgaaacactaacgctgcgccgagcgaatataactggaaatccataattcacaggtgttttttcccatcctgtggtttccttggcgttttctaggttttttcagatagttgcatttttttaaaaagcatcctaagttcgatctcagtgtctatctggggcctatttctgtcccatatatgccccaaaaaaactccccaacagataagtagttttttcatggatttatgcgtaaaatcaagaacggctggaaatcattcaatactcacactatcgaaaaatttaccagccaatcgcagcacgttcttgcataaggtgtgtctgcggtttttcaactattcagatacatcactcccatcacattcattcctccgcatcaaaggcatataggctatatcaccttgatatttttctttttcagataaaaactgttatctatgtatacttttaaacccaatccgtgtagagtctctacataagatagtttgcagttgccgcttcagcttgcgccataaaccgcctgatttttgctgccacctgttagcattcctgtatacctgaaacgacaatgtttatctacgaactttaagaacacccaggataaaaattgtcaactatatcatatataacacattactaattcgaggctatatgaacagcatactgataatcacatctctccttatcatattcagcatttttagtcatgccctaataaaattagggattggcatatccaataacccagacaaaaccgatgtataagtcaacatatcctgaatcagacatacaatatcgcaatgaaaatcaataatattttaaggaatatcttcatgaaatcaaaagacaccctaaagtggttccctgcgcagcttcctgaagtaagaattatcctaggggatgctgtagtggaagtagcaaaacagggaagacctatcaataccagaacattgcttgattacattgaaggaaacataaagaaaaaatcatggctggataacaaagaattattacaaacagcgatatcagttcttaaagacaaccaaaatttaaatggtaaaatgtaatataataaacttacttttttatcatttttccactttaacaacattttgctccacttttccacgaccaaacaacttgaaatctggttaaaataacacgcaacactattcttcttccttgagtccgcccggaactcgaaaaacaaaccgagttaaagccatttttcacaaaatcgattttgggtctcaccaaaattacggggttgcatacgcattcgtttattttcgaacgtgtacatacaaatatgcacaaaaataatcataattattttctgagatgcattatgatatgaacaccaatttcgtatagagtctcactatgtctcaaatttttgcttactgtcggatatcaacgctggatcagaccaccgaaaatcaacgccgggaaatcgaaagtgcaggttttaaaatcaaacctcagcaaataatcgaagaacacattagcggctcagcagcaaccagtgagcgtcctggttttaaccggttgcttgctcgcctgaaatgtggtgatcaattgattgtgacaaaactggatcgccttggttgtaatgcaatggatatcaggaaaacagtggaacaactgaccgaaacaggtatcagagtgcattgcttagcattggggggcattgacctgaccagtccaacaggaaaaatgatgatgcaagtaatttcagcagtcgctgaatttgaacgagaccttttacttgaacgcactcattccgggatagtaagagcccgcggcgcagggaaacgttttggtcgaccacctgtgttaaatgaagaacagaaacaggcggtattcgaacgaattaagtcaggtgtaagtataagtgccattgcccgggaattcaaaacctcgcggcaaaccattttaagagccaaagcaaaacttcagacacctgacatataaaaaataatctcggtgtgagatgctttacgtcttccaagcccccttccttgccgtaaatggaaagatacatctaattatagaatttatatgttttaccctacggcagtgctggccattcaatatcctgtgcagttgacgtatcaacacggttcagcaatacccgatactttttccatgcttccagcaacgagatttcttcctccgttgcaatttccagatctgcagcatcctgaagcggcgcaatatgctcactggctacctgcatcaggttgttttttgtttcttccgcctcccggatccggaacagtttttctgcttccgtatccttcacccaggctgtgccgttccacttctgaaactccccttccggcgataaccaggtaacattttccggtaacggaccgagttcagaaataaataacgcgtcgccggaagccacgtcataaaccgttttaccccgatgatcttcaacgagatgccacgatgactcatcactgttgaaaacagccacgaagccagccggaatatctggcggtgcaatatcggtactgtttgctggcagacctgtatgaggcggaatatatgcatcaccttcaccaataaattcattagttccggccagcagattataaatttttatggtccgtggttgttcactcattctgaatgccattatgcaagcctcacaatatagttaaatgcgatgtttttgacggtgttttccgcgttaccagcagcgttaacggtgatggtgtgtccatgtgaaccaatcgcaacggagtgcgtatgagcaccaataccgacagtatgtgcatgcgcgcctgcgcttgcagcagtgccggacagcgagtgggtatgagcaccatctgatgatgtcttccctgcattacgagtctggccactaccgcttgttgtgctcataatccccgcgcttagatttgaaatcgcggtataaccattagggaaaatgctcgtgttcgtgccaccaaatgcaccggaactcttgtgttggtgcgcaccggcactatttgcggtcccgctaatactatgggtatgcgccccggtgttattcgtggatttggttccgtaatcaaacgacgatgtggtttccgtccccaaatccgtactggatgcgctggcgctgtgggtgtgcgatttaatgccgtcctgttcctgagataatacggcccgaccactggcgggcttgcccttaatcgtccagccacgcatatcagggatcacgcctgacggataagcaactgcaagtttcgggtatgcagatttgtcaaaagtctgcccctgcatcagggcataaccagacggaacggtatctgatggccacgggattggtgcaccgactggataaaactctgcaggaggatgagccgaggtgtaaagctgcgcccacggcgaccagtttgcgtcggtcgtatcccgtcgtgaacgaataaatgccggagcatgagcaccgcttgtaccactccagccgatgagtaactcaccttcgccaacggctgtcatccctttcaggtgaatgatatttccatacgctgttggatatccgttgttatacacctcgtataactcaagacctgctgccccctgcgtattgtctgtcagcgcggttatattcactcagcaaccccggtatcagttcatccagcgcggctgctttgttcatggctttgatgatatcccgtttcaggaaatcaacatgtcggttttccagttccggaaaacgccgctgcaccgacagggggatcccgtcgagaatactggcaatttcacctgcgatccgcgacagcacgaaagtacagaatgcggtttccaccacttcagcggagtctctggcatttttcagctcctgtgcgtcggcctgcgcacgcgtaagtcgatggcgttcgtactcaatagtccctggctggagatctgtctcgctggcctgccgcagttcttcaacttcccggcgcagcttttcgttctcaatttcagcatccctttcggcataccatcttataacggcggcagagtcataaagcacctcattacccttgccaccgcctcgcagaacgggcattccctgttcctgccagttctgaatggtacggatactcgcaccgaaaatgtcagccagctgctttttgttgacttccattgttcattccacggccaaaaacagagaaaggaaacgacagaggcccaaaagctcgttttcagcacctgtcgtttcctttcttttcagggggtattttaaataaaaacattaagttacgacgaagaagaacggaaatgccttaaaccggaaaattttcataaatagcgaaaacccgcgaggtcgccgccccgtaacctgtcggatcaccggaaaggacccgtaaagtgataatgattatcatctacatatcacaacgtgcgtggaggccatcaaaccacgtcaaataatcaattatgacgcaggtatcgtattaattgatctgcatcaacttaacgtaaaaacaacttcagacaatacaaatcagcgacactgaatacggggcaacctcatgtcaacgaagaacagaacccgcagaacaacaacccgcaacatccgctttcctaaccaaatgattgaacaaattaacatcgctcttgagcaaaaagggtccgggaatttctcagcctgggtcattgaagcctgccgccggagactgtgctcagaaaaaagagtttcttctgaagcaaacaaagaaaagagtgacattactgaattgctcagaaaacaggtcagaccagattgaagcaatttagataatcgtgcagactacgccccctcatatcacatggaaggtttatctatggatcaggtagtcatttttaaacaaatatttgataaagttcgaaacgatttaaactatcaatggttttattctgagctaaaacgtcacaatgtctcacattacatttactatttagccacagagaatgttcatattgtattaaaaaatgataatacagtgttattaaagggcctaaaaaacattgtgtctgtcaaattttcaaaggataggcatcttatagaaacgacctctaataagctgaaatccagagagatcacatttcaggaatacagaagaaaccttgctaaagcaggagtttttcggtgggttacaaatatccacgaacaaaaaagatattactatacctttgataattcattactatttactgaaagcatccagaaaactacacagatcttaccacgctaaaccataacgtccggcttctctcactcctgagccggactgcattggtttaataaaaaccatcaacaattgtgatttagatattcggaaccattcaaatataacaaaaccccgtaaaaacgaggtttatggataaattttattattgaatacatcagattaaattaatcttgacatcatagctttcaagacccgtcattttttcccgtgcggtaaactgaatactggtaacttctttcccggtctttttcttaagttcaataattttttttgttatatattcagaaatatctgcttctgcttttgtttttaagttttcaatattcatcatttcctcttttagtctgttatgactttccagttacacagtaagtcgattatatggtgcaaacgtgtaaaagataagatgaaacatcgcaataatcaacatacgatagtctaaattttacacaaacagacaaagagaattttcctgaattatcaatgcaatagcatcaaatcaactcaagagccttattgctgcttccagaatttcttctgaagtaacatgtcgatccgcggctacataaatgactttatgatctccggtcagagatggaaaccctgcggccattacagtaaggtgtgttttttcgccatttggatattcacgcatgatggtgttaactccagtcatcgctggcactaccactgctggttcagagttaaaaaaactatgatttttttcatgatgttaccgtagtatgtgagtatccatcgaatagacaccaagcaaaaaagctcccgaaggagccttcattttcacttttttaaatccaacgacagacggctggcatttaagtattgtgaaatattatcaaatgtaatcatcattgatttacaaaagatacattttgccccgaaaggattcatgtcagaaacatcaaaagatgatgttctatactgggaaccatgacaacacgggcatctaaagtgaatatggtttgtaatattgtctacctcaaagcgccactacatgaacagcggcaggacctttaggtccgttctcaataccaaattcaacttcctgattctcagttaatgttttgaaatcgttgctctgaattgctgagaaatggacaaacacatctttgctgccatctttcggcgtgatgaaaccaaaacctttttcagggttaaaccatttcactaaaccagtcattttgttagacataattattaccttttgaagaaattagcccttgggcagaatggtccgaaaaaaaatatcagagagaaaaaccaacaaggaaatctcaagaggtacaaataataaaattataacaatgactgcttcagataaatttgtaacaaaccagaacaccattaacgcatgattaaccacccatagcaaggattacttttgtaaagaaaaacacagcaatgaaagaatagctttatttattaataaaacgtgtcattctgattaagaccttttatcttacccttaagatttcaggaattttggctcatggaagagtcctttttatttaaattttacattccgcgatgtaaatgttccgatttaatattaccctacatttgatgctttttatctcttaaagattcatagatctgttgacaagtcactcctgcgatgtagcgttcgtcagcaatttcagcataaagctgagcttctgctgcaatatctccgagcatgttggtgagcattccttcggcggttttggttgttttgcctctgacggcagcggcaagatctgcggtatgcttcgctgcgtcaaggcgtatggcatatttttttgcttcggcacgcaactggttaacactatcagacagataagcagccctggcagaaatttcagcagatttctgttgcgcatctttaacagcctcatcacgggctatagttcgcccctgttcaattattcgagcagcaaattgagcatttacctcttgtgataatgcggcagcatcacgttccgcccattttttttgccatcctcggtcgctccagacatttccgacgataaatcctgacaacacgagaaaaatcaccatgaatatctgattcactgttctatcccccagcaggttaatgcgctctcctggtcacgacgaataacctgaccgtaacagttatttgaacgaatgcggcaatcgcgtccgccatccttaatccaccagcgaatcgcttcgcatgcacctttacgatcaccagcattcagccgcttataaaacgtcgacgggaaacacttaccggggccaatgttatagggacaaaatgacgcgatacccgctttttgtggttcggtcagtggtactttaatattgcgctccacccatgccagcgccttatcacgctcaatggcgttgacctggtcgcatttttccttcgacagtttcatattgggaaaaacggtttttccatccaccactgtggcaccccgacagatggtccatatgccagaaccatcgcggtatgccattgtgtggttaccttctttttcgtccagaaactggtcaagtatctgaggagcagatgcgccagcaccaatcagcgccagaacggcagccgacaggccgtatctgatttttgtgttcatagatatttatgatgaggacgctcgtgcttattggcaggattttcaatcttaaaggagtactgatgctgcagataagactcaactttttctgacaatttttctgctacttccaggaagacttgccggacgctccttctggctgctgcctcataaaactccagcgcagctccttcaacacggtccatggcgacatccaggtcaaaaatttcaccgtcaaagcgttctttgtcctgtaaggctacagttaccgtaactttattctcaaaattacggactcctttcacaaccagttcatagtcttgagtcattggattactctcctctcgcagccttacgcctgtcttctttaatcttgaaataaagatttgtcagatacgtcagcaggccaaaaaccaggctacccagcacaccgattgcagcccactgtgacggagttactttatcgagtaactgcaatgcccagaaaccagcattacccgccgatgtgccataggcaacacctgttgttaacttatccattgatttcatatcctcaccccgatgtacacggatggtgcaatatgtttgaaaagatcggagtctacggggtagttttgacagcacacgttgttctcaacggcgctaaaaaaacatacacattaaaaatgtgggtaattattttgaaagaaagtcatatataaaataataatacgagaaatgttttcatatttagtgtactgtatacggccatttatacaggaaaagcctatgtcagaacgtaaaaactcaaaatcacgccgtaattatctcgttaaatgttcctgcccaaactgcacccaagagtcagaacacagtttttcaagagtacaaaaaggtgcccttttgatctgccctcattgcaacaaagtattccagacaaatcttaaagctgtagcctgattgattttattagtaacaagtattttttatattttaataatatatttaaagcagataataaaaaacccgcctgagcgggtttgagattgtggtgctttttgtgggagtcatccacttacgcactttgttttgccatgccagcagttagcttctgctgtaaaactattcatgcagcaaacctgcacttcaccacaatggttagcatacttttcctgattaagattttgccaaatatgctagccattgtttcatgtattggacctccttactttttattaaagagatccaatattcactactctgtccgtatctctactcaggcatcagccttcttcgttatcgtatacagacgagcgatgaattttaatcagtaatgatgacatttgctgctgcaggacctttagcaccactctctatagagaaggtaaccttttgaccttcaaataaggttcgataattatcattctgaatcgcagaaaaatgcacaaacacatctttactaccatcaacaggagaaataaagccgaaacctttatcagcgttaaaccattttactaaaccagtcattttatttgacattctacattccttaacttgagcctttcggcataaatggtttgcataacagaaacgacttcgtacttaattggagagactcaaagaaggaataagtgaataacacctgaaatgagaactgctttagtaaactacttcgtatatcgtctgttcttcaaaccgacgcaatcattaacgcatagttgaacatatgaagcaatgtttattttagacatccagccatcttcaaccccatcaaaaaactatagctttcttcaggaacgtgtgtatagtgcgccaagttatcagtattaaggaatttttttgtcccgtaaaatgacaggaattgtcaaaacctttgacggcaaaagcggcaagggtcttatcaccccatccgatggtcgtatcgatgtccagcttcatgtttcagcgctcaatctccgcgatgcagaagaaattaccaccggattacgcgtggaattttgccggataaatggtctgcgtggcccttcagctgccaatgtttacctttcatgagctatattaaagctttaatttcaggccccatcggatcacacatggagagtttttatgaataaccccgtctgtcttgatgactggttgattggctttaaaagcttatgctgtactttggccgtaatagctctgctaataatataataagcagactcattgtgtttagggacattgtactggaagaaaacattttaaacatcaggcaaataaccaagtcaccagctaaataataagttaacagacatgagtcccgggatgagattcaacattaccattgccccatttaaagcacaaaacccgctcatcagcgggttttctactttttcttaacgtcgggtatacaaagcccatcgttgaaaaaattttatccatattttttgaaaaatgcaaacatcatgtcgccatcttcagcaaaaatcatttatctcgtcaccttcctcaattgcgcttccgcgtatgcttcttcctgccagcactttgttaccagtttaccaatgacgtccgcataccccttataccactgataatcggtcaggtctggtaccagcttctggacatgacgtcgtgccagcgtggtcggtaaacgactaaaccggtttccattacaacgcccacaaatcttatataccggtacgccatgaaaccgggttcttttttcatccagaacaatccctttacccttacaccctctgcacgctgtgctggcttcgcccttaccatggcaatgctgacatagttccttcacccattcttccttgattacagattccccgcgtctgtagtgtttcaccacttcgcgcaatacattataaaatcccgtacctgaacaatgctcacagcgagccttacttgccgcagacctggagtaatcagcaaaggcaaaactcacgaggtaaggaataatctgtaaccggatttcttcactcaatttgttcaatgtcgggttatccagtgccatcgcgtaatttagcaggccttcaatcgcaaactgagggtcctgaacaccaacttttgccagaaataaggccaacccaagtggtgctttcgactgcaccatcccctgcgctgccattacatccgtaattgttaaacaaccggtgcctgtcgctggagcgtcatcgctcaattttggagattttggggagtaatattttggtaaggcttcaaggttcatgctcgttctccacttacgccagtacgccaattgccagcgcgcgatcgataaaacgaaatatcagctccagttgggagccatacttatcttcaaatgccactgtatccgtatgcagctcgttgtgatgctttctgcacaaaggcaacacaaagagatcatgtgcttttgttcccattccgccctgcccgtgaccaatcagatgatgcggatcgtcggctggcataccgcagcaagcacacggctgtgtcttaacccaacgtgtgtatttctccttaacccagcggcgacgtttaggcagcttcatgaaagattccggagactctggatcaacggtgatgcttaccaccgtcttttcctgtggtgatttttgttgctggtgggcgtaaggcaacggtgcaagattttttgtgcgttgtttcaatatgctggtggcggtctgctctcccggtacgatgtcgctttcgcggtacaccgagcagattttttccgctggtaatcccagcgaacgacgcgatacagcctcaggtagtgcatccaccacctgattgcagaccgcccaccaggataattcagccaaagataattcccgctcctgcgtaccgcttattgcgtgacggatgacgtcaatcacccatgctgtcagattttgttgagcaagcagctccagtgattccgatgtctggtcacgcagttggttgtcgcagtgccagcacaacaccattgcgccggtaccataacggtgaatgactgtttcagtgtgatggtaatcgccattaggccactggcaggatgtaacatgacgtaatagccagtcggacaatgcgccaacgccgccagcagcacgaatcacccgttcgttactaaaaaacggcagcaatgttttgtcttccgccagcggctggcgaacggcaggaacgactccggatggcagattacgcatgctttttggttccggttccaccagcactcgaggattatgaaatatctgtatggattcacggcccggcttaaggaccaccagcccaagctcaggcaccagaacaggtctaagtaatacccgcacgttacctccagatccgttgctggaaagtgcgggacgcacgtggtgggcgttcggaataaggcagcctgacagagattatccagtgccgatagtcgagactgagagctttcttaacctcgaacccgcgcctgcggtaagaatgaatcagccattcggcctgttctgcagtgcatggagggtgctggaaccattcagacttgaatgcgtgagaataccgcccgtgcgtgcaggcaagaacgggcgaattatcagaattgtaatattttgcgttgcgtgccatcggttttctccggtggcacggtgttactcagcgggagttcagccccgcgcaagattgtagatgagtttattctcctgaaaaagcagaaaagccagcttttattccgatctctttcaatgcctgtaatgaagtgacaaactcaccttcgcgcaagataaatccgtccgtgacccgagcatccacaaaattaattaacgcagccccattctttcgcaaacacataatgcggtaatgactaacaagatttccattttcaacgcacacagcatagaggccatcttcacaaaaaattttacgcagttcttcgatgttcatcatcagaatccttccggataattagctctcccctttaagggaccatccctcttatccctgcgcgctacttaagtatttttgattctattccggcaccgtccagaacttcaaacgcgttgaaaataaaaacaaaaacccgccgaagcgggttaagtgcgggtgcgttgaggatgcctgccacatcagaggtggcgagggatttctcccccgccgggtctcttactcctcaggttcgtaagctgtgaagacagcgacctccgtctggccggttcggattcgtacctcgcagaggtctttcctcgttaccagtgccgtcactatgacggttaaacagatgacgatcagggcgattaacatcgccttttgctgcttcatagcctgcttctcctgtcaacgcaaagcagaagtgtcaccttcggtgcgaaacagagatgtcatgctttggttcagagaatgcgtttgaccgcctcgctatatacttccgagcgttctcttttcccaacagaaatcacgaaaacgacaactttctcgtctataacctggtatacaaggcgatagcctgaagaccggagcttaatcttgtaacaatcaggcataccacggagcttgtttgcttcaatccggggtgactcaagtacttcaaccagcttctttttcaactgttcacgtaccgtcgagcccagctttcgccattcctttagtgcccgctcgtcaaaatccagaaaatacgccatcagagttcatccagcgtcacacgtactggcttaggattacgaagccgttctttcactatctccacaagttcagcatcttcatcactcaggagtgtctgtttgaacggcaagcgttcattgtcagcgatatactcgagcatgagacgaagcgcttcagaaggagttacacccattttttcaagcgcggcgtaagaacgcgctttaagttcatcgtcaatacgcaggttaatgctacccatgtcttacacctcttgtaattacaaatgtcattacaagtatcgcactacaacatgcttagggcaagtcacgaaggaagtcagaaagtagtcgtaagaacggtgatcactgtccgctttgtgccaggagcagccattgctaagtccatcctgtattgtgcaggtcagctcgtttttaaagagtccggccatcatcttactggtacagacaccatatactttgtgacggtcaggctacatatgcacaactcaacttattcatctattttttgctttagcatgtcagtgttgctttctcgtcggcgggtgagcggtgacctgacctgtcgataaaggaacgtaacacgttttatgcaacacccgcatgcggcagaaaattattgccgaacgtttacccctgtcaacaagctttactttctgaggcgcgccagcccgcgaggaaaacaatctgaacatcaaacaattaatgacacaagaaatacgattaaagatttttttgtgcatgccgatagtgcttttttaaaaggagaaatctatgtctgtcacaattcagggaaatacctcaaccgttatttcaaacaactccgccccggaaggaacatcagaaatagccaaaatcacaagacaaattcaggtgctgactgaaaagcttgggaaaatctcatcggaagaggggatgacgacacagcagaaaaaagaaatggctgcattggtacagaagcaaattgaaagcctctgggctcaactggagcagttgttaaggcagcaggcagagaaaaagaatgaagacgcgacagttcagcctgataaaaaagaagagaaaaaagacgatacaaataccgctggcaccattgatatttacgtctaagtgacagccgtattgtggccctcatcgggccacttttcgccatcagccttttctttaaagacatattatctttgtatcatttctgatagttaacattacaagatataagtaatggacgcactcccaattagtctatttaaatcgccacgagtttaactgacaacccatgatcaattatgaattgcaactatttctgtagtcacttttgtggggacagtccacaaaactgccaacttccgcttcttgctcttagcggacattagcataggctatttaccataacgcctcattacgcgcaccgcccagactgactcagcgcgtttctggcatatccccggtaaaacaagtaacaaaccacccgaaaatgaacaccagaaacgcgacttaagaatctaccctatgaatggatatgcactcaaccgaatcgatcttggtttcaatcttttttatcgggatcaggcttctttttaggtaacttcgggggcttaacttgctgatgactttgcgttcggcgcgtaagccagggatggtcagctttaggtttaacatagtattttgagcgtaaatcaatacgggcattatccactcgttcatggacactcttttcatcatccagtggtagcctccataattgcaggcactagcgccgtgaacttttcacgcttatccctggtgtcgatagccttccagcgttcaaatatcttcactcgattaacgccaagcgctcgctgatcaatcgcgccaccttcatatgtgacacgctgaacatcgatgttcgggcgctctttcaaagcccagaatgcttcagtgattaatatcgtcgcctgctcctgtgtcattcctggtcgacatatccaggcatccagagcctcacgagcctgttcaggagtgattttcattgttcaaccgccccgcccgcttcgtcttacgatattcatcataaactttgggatcatactgaagctccccgccagatgcctcctgtagacgcatcgcgcgaccttcgggaactaaatcccctttccagctataaagcgaagccaaacgaatacctgctgcttgtgcaagttttgtttttgaaccgaaatacaaaagagcgtcagttttaagcatttaaaacacctttattgttagtcataactaacaagatagatgttaacaaaaacatagtcaatacgatttagcattagctaactatggaaacaaaaaatttaactatcggcgaacgcatcaggtatcgtcggaaaaacctcaaacacacccaaaggtctcttgctaaagccctgaaaatctcccatgtgtctgtatcacaatgggaacggggtgatagtgaacctacagggaagaacctttttgccctcagtaaagtattgcaatgctcaccaacatggattctatttggcgatgaagacaagcaaccaacaccacctgttgagaagccagttgccttatcccccaaagaactagagctccttgagctgtttaatgcactgccagaatcagaacaggatacccagctcgccgaaatgcgagctcgagtaaaaaacttcaataaactctttgaagaattactaaaagcccgtcagcggacaaataaaagataacatcatcaatgagttatcttttaccacatcaattatgttagctatagcatacaaaatcacttgaccgatatgttagtcatggctaatcttgtttgcatcaacacaccgcacggtgttctcagcaaacagttccgctaccccagcgttaaggggaaatgaggtcagcatggatactatcgatcttggcaacaacgaatctctggtgtacggcgtgtttccaaaccaggacggcacgttcaccgcaatgacgtataccaaaagcaaaacgtttaaaaccgaaaatggtgcccgtcgctggctggaaagaaactcaggtgagtgatatggatttcgacacaatcatggaaaaggcttacgaagaatacttcgaaggccttgccgaaggcgaagaagctctcagcttcagtgagtttaaacaggcgctttccagttcggcaaaatctaacggctgataagcgaaacagcaccgcgaggaatcagtatgcagaaacgagaacccgtcatcatcgcgccagactataccgatgatgaactttatgagtggatgcgccagaaaattaatgcagcgcaggatctgaaatgggctaatgaagccagggctaagcaggctgaaaatctgtccgctctggagcaggatatcaccaatctggaaaaagcagcggcattaagcattgccagaatgattacatacccgcgttagtagctaatcaacaaagctaaggttagtaattaaggagttctccacgggtgaggtggagtgcgtgcgccggacacgggtgcgcatccggaactgacagtttactgaaaggatatttccctgaaaagtcagaccataacgcgaaagcgcatggcgaggtagctggttcatagatagcctgtcgttaaattttcgtcgaccgtgcgcttccggttgtggcaacccgcgaaatggcgcggcggtaagtatggcggggttattccttccccgttgaggacaccgggttgtcaggttgaccatacgcttaagtgacaaccccgctgcaacgccctctgttatcaattttctggtgacgtttggcggtatcagttttactccgtgactgctctgccgccctttttaaagtgaattttgtgatgtggtgaatgcggctgagcgcacgcggaacagttaaaaccaaaaacagtgttatgggtggattctctgtatccggcgttaattgttaactggttaacgtcacctggaggcaccaggcactgcatcacaaaattcattgttgaggacgcgataatgaaaacgttattaccaaacgttaatacgtctgaaggttgttttgaaattggtgtcactatcagtaacccagtatttactgaagatgccattaacaagagaaaacaagaacgggagctattaaataaaatatgcattgtttcaatgctggctcgtttacgtctgatgccaaaaggatgtgcacaatgaattcagcatttgtgcttgttctgacagtttttcttgtttccggagagccagttgatattgcagtcagtgttcacaggacaatgcaggagtgtatgactgcagcaaccgaacagaaaattcccggtaactgttacccggtcgataaagttattcaccaggataatatcgaaatcccggcaggtctttaaaacagttccgtaataaatatccggtttcattcttatatgccagcaatggcagggatttgttcatccttaaatctgtcatgaggttaaaacaaatgagtaaagtctttatttgcgccgctattcctgacgaactggcaacaagggaagaaggcgctgtggctgtagccacagccattgaagctggcgacgaacgccgtgctcgagcaaaatttcactggcaattcctggaacattatccggctgctcaggactgcgcttataaatttattgtctgcgaggataaacctggcataccccgccctgccctcgattcatgggatgctgaatatatgcaggaaaaccgctgggatgaggagtctgcttcttttgtcccggttgagactgaatccgatccgatgaacgtcacttttgacaagctggcccctgaagtacagaacgctgtcatggttaagttcgacacatgtgaaaacatcaccgttgatatggttattagcgcacaggaattgttgcaggaagacatggcaacattcgacggacatatcgttgaagcgttgatgaaaatgccagaagttaacgccatgtatccggagcttaagttgcacgccattgggtgggttaagcataaatgtattcctggtgctaaatggcccgaaattcaggcagagatgcgcatctggaaaaaacgtcgcgaaggtgaacgcaaggaaaccggaaaatacacgtctgttgttgatctcgcccgcgccagagccaatcaacagtacactgaaaattcaacaggaaaaatcagcccggtcattgctgccattcatcgcgaatacaagcagacatggaaaacactggatgacgaactggcctatgggcgctgcttcgcagacaggcagaacttgatggtatgcctgcgatcaatgccaaacgtgtttaccggatcatgcgccagaatgcgctgttgcttgagcgaaaacctgctgtaccgccatcgaaacgggcacatacaggcagagtggccgtgaaagaaagcaatcagcgatggtgctctgacgggttcgagttctgctgtgataacggagagagactgcgtgtcacgttcgcgctggactgctgtgatcgtgaggcactgcactgggcggtcactaccggcggcttcaacagtgaaacagtacaggacgtcatgctgggagcggtggaacgccgcttcggcaacgatcttccgtcgtctccagtggagtggctgacggataatggttcatgctaccgggctaatgaaacacgccagttcgcccggatgttgggacttgaaccgaagaacacggcggtgcggagtccggagagtaacggaatagcagagagcttcgtgaaaacgataaagcgtgactacatcagtatcatgcccaaaccagacgggttaacggcagcaaagaaccttgcagaggcgttcgagcattataacgaatggcatccgcatagtgcgctgggttatcgctcgccacgggaatatctgcggcagcgggcttgtaatgggttaagtgataacagatgtctggaaatataggggcaaatccacaggtgaactacgctcctctgtttgttacgcaataaaaactggtgttttcgactatgcaaaacagtttccctcctcacgcaatctggaaaaatttggtgaggcccgacaagatttaaccataaaagaactggctgaaaaatttctggcactgaaagaaactgaagtcgccaaaacatcactcaacacataccgtgccgtcatcaaaaatatcctgagcataatcggtgaaaaaaatcttgcctcatcgattaataaagaaaaattactggaggttcgtaaagagttactgactggataccagatccctggatttgcccctatatttccagacatctgttatcacttaacccattacaagcccgctgccgcagatattcccgtggcgagcgataacccagcgcactatgcggatgccattcgttataatgctcgaacgcctctgcaaggttctttgctgccgttaacccgtctggtttgggcatgatactgatgtagtcacgctttatcgttttcacgaagctctctgctattccgttactctccggactccgcaccgccgtgttcttcggttcaagtcccaacatccgggcgaactggcgtgtttcattagcccggtagcatgaaccattatccgtcagccactccactggagacgacggaagatcgttgccgaagcggcgttccaccgctcccagcatgacgtcctgtactgtttcactgttgaagccgccggtagtgaccgcccagtgcagtgcctcacgatcacagcagtccagcgcgaacgtgacacgcagtctctctccgttatcacagcagaactcgaacccgtcagagcaccatcgctgattgctttctttcacggccactctgcctgtatgtgcccgtttcgatggcggtacagcaggttttcgctcaagcaacagcgcattctggcgcatgatccggtaaacacgtttggcattgatcgcaggcataccatcaagttctgcctgtctgcgaagcagcgcccatacccgacgataaccatacgttggcagctctccgataacatggtgtatacggagaagcacatccgtatcatcagtgtgacgactgcggcggccatccatccagtcatcggttcgtctgagaatgacgtgcaactgcgcacgcgacacccggagacaacggctgactaagcttactccccatccccgggcaataagggcgcgtgcgctatccacttttttgcccgtccatattcaacggcttctttgaggagttcattttccatcgttttcttgccgagcaggcgctggagttctttaatctgcttcatggcggcagcaagttcagaggcaggaacaacctgttctccggcggcgacagcagtaagacttccttcctggtattgcttacgccagagaaataactggctggctgctacaccatgttgccgggcaacgagggagaccgtcatccccggttcaaagctctgctgaacaattgcgatcttttcctgtgtggtacgccgtctgcgtttctccggccctaagacatcaatcatctgttctccaatgactagtctaaaaactagtattaagactatcacttatttaagtgatattggttgtctggagattcagggggccagtctaatccccaaaagtaactatattgttacacaaccagggagatcggctgtaactgtaaataattacatgacaaatcttaacgccgtgttccagtttggtgttgataacggttacctggcagataatccgtttaaggggatctcgccattaaaggaatcaagaaccattccggatcctctttcgcgggaagaatttatccgtcttatcgatgcgtgcagaaatcagcaagcaaaaaatttatggtgtgtttctgtttatactggagttcgccctggtgagctgtgtgcacttggatgggaggacatagatctgaaaaatggaacaatgatgatcaggagaaatttagcaaaagaccgtttcacggtaccaaaaacacaggcgggaaccaatcgggtcattcatcttattaagccagcaatcgacgctctccggagtcagatgacattaacgagactgagcaaagagcatatcattgatgttcacctcagagagtatggcagaacagaaaaacaaaaatgcacctttgtttttcaacctgaagtgtcagcgagagtaaaaaattatggtgaccattttaccgttgactcaataaggcagatgtgggacgcagcgataaaacgtgccggactccgccatcgaaaatcatatcagtcgagacatacttatgcctgctggtcgctgacagctggtgctaacccggcatttatagcaaaccagatgggccatgcagatgcgcaaatggtatttcaggtatacggaaaatggatgtctgaaaacaataatgcacaggtagctttgttaaatacacagttaagcgagtttgccccaaccatgccccataacgaagcaatgaaaaattaatttaatatttatcaaatagttaacacgcatgactcttgaaatccataaattcaagcgcagtgcccagccatcccgatactgctgctttcaccaaatccttagtgcttctttcgtgtttttctattgtcataatggttatctctaaaaaagaggtaagatgcgtactacttactcgccgttattggtattattcagaaaaagtgagtaagactttgcagcaatgtttttgatcctgttcaaataaactaatggcatcagcaacatgctggaaatcaaacgtatgggtaattaatttttctggtttaattaaccctttacttaaccagtcgataacgatcgggaatttatttgcatttaagcgtgaagagaaaatagagagttcttttccggtaattccttgctgaatcacttcagacggttcactggagaaccccatcaatacaatacgtgccgctggagaagccagcgttacggcctctttcaggatagaaggatgacaagccgcatcgataattaatgtcggcttgatgcctttttcagtgaaaatctcgccaagcggtgtctggctgttattaatcgcccagtcagccccgctctctttcgctttttccagtcgttcatcaatgcgatcggcaacaatcacatttttaacgttatagacgccttttaatacctgaacgatcgtcaggccgattggaccggcaccataaaccagaacggtatcattttcagtcggttgaccatgtccggttacgttagccgcaatggtaaaaggttcgatcattaccgcatattgatcggccactgcttcaggaattttccacgcattttttgccggaaccacggcatattcactgaaaccaccgtcagcgtgcacacctaatacagccagtgtcgtacaaacgttcggtttacctatagagcacggatagcaatgcccacagctgaccaccggatcgacagcaacacgttcaccgactctggcgctttccacgccttcacccactgcatcaatgacgccaaagaattcatgaccaatgacgcgcggatatttcgcaaaaggattatgcccacgataaatatggctatctgaaccacaaattccggcaagtttcacttttactcgtacttcacccgctgacggggtgggtatttcacgttcgacaatcgccagttgattcggtttttcaattaatatgcttttcattatcttactccttaccagttccacagcgtgccatcttccagacgtgcgactggtagataagcaggttcatagggatatttcgccgccagcttttcatcgaattcgataccaagacccggtttgtctcccggatgcatatagccgttatcgaaagtccagttgtgcgggaagacttcgagcatttgttcggaataacccatgtattcctggacaccgaaattggggacccacagatcaaagtgcagcgccgcagccatgcagactggtgacaaatcggaaggaccgtgtgagccagtacgtacctgatacagcgaagcaaaatcggcaatccggcgcataccggtaattccgcctgcatgggtcagcgtggtgcggatataatcgatgagttgctcttcaatcagttgtttgcagtcccagatgctgttgaagacttcacccactgcgatgggtgtgacggtatgttggcgaatgagacggaagcattcctggttttccgcaggcgtcgggtcttccatccagaacatgcgataatcttcaatgcttttaccaaagcgcgccgcttcaataggcgttaagcgatggtgcatgtcatgcagcaaatgttcattaaaaccaaacttgttacgtaccgcgtcaaacaatttcggcatgaaatcgaggtatttctccgtcgaccacagctgctcttccggccactgtcctttggttgcgggttcataagccagacctttacctttcgacatgccgtaggtggttttcataccagggattccgcactgcacgcggatggctttgaatccaagctcttgatgacgggcataatcatccagagcttcatcaatactgtgaccggtggtatggcaataaaccatcaccccttcacgagacgcgccgccgagtaactggtaaagcggcatgttggcagctttggctttaatatcccacagcgccatatcaaccgctgaaatggccgacatcgtaaccggaccgcgacgccagtaagcacctttatagaaaaactgccagatatcttcgatacggtgcgcatcgcgaccaataagctgcggacaaaggtgatcctgcaaataagaggccacggaaagctcacgtccattgagggtggcatccccaaggcccgtaataccgtcctcagtggtgatttttaatgtgacgaaattacgccccggacaggtaacaaaaacttcagcctttacgatcttcatgttcgattccttgcatcgcttgtcgtgatgcatgaaatctacgcaactgagctactaccatacaagtataaagatcgaaaaaagccggagtgatcacaaaaaaaggcgtatatttgcgctgtgaatggttgacaaaagatgaaatagaataccttttgtcagctgacacttcctcttatcttattgataaaatggatttatgttcctacgtgcgcccccagcccgcaacaatgatcaacatgccgcaaagcgcaatcaacgcacccgtccagtcataaagagtcagtttcacgccatccacaacgcgcagccacatcaacgccgtgcagacataaacgccaccataagccgcgtaaacacgcccactcgccgctggatgcaacgttaacaaccagacaaacagcgccagtgaaatccccgccggaagcaacagccagatactggcgtttcgttttaaccacaaccagggcagaaagcatccaataatttcacacagcgcagtagcaaaaaatagtaacgttgttttaatcatctttgtctcttattgacatcatgtatagttatagggcgacataatatcatcaatataaacaccctcctggtacgttttgcgtccgcagtggatggtgtagaatcacctttaatcattcatacagggaatgaattatgaaaatcactctcagcaaacgaatcggcctgctcgctattctgctgccttgcgcactggcattgagcacaactgttcatgccgaaactaacaaactggtgattgagtctggcgacagtgcacaaagccgccagcacgccgctatggaaaaagagcaatggaatgacacgcgcaatctgcgccagaaagtgaataaacgcactgaaaaagagtgggataaagccgacgccgcttttgataaccgcgataaatgtgagcaaagcgccaacatcaatgcctactgggagcccaatactttgcgctgcctggaccgtcgaactggccgcgttattaccccctaacctgttattgatttaaggaatgtaaggacacgttatgccaagcgcccacagtgttaagctacgcccgctggagcgtgaagatttacgctatgtacatcaactcgacaataacgccagtgtgatgcgttactggtttgaggaaccctacgaagcctttgttgaactctctgatctgtatgataagcatattcacgatcagagcgaacggcgctttgtggtggaatgtgacggcgaaaaagccggtctggtggagctggtggaaattaaccatgttcatcgccgcgcagaatttcagataattatctccccggagtatcaggggaaaggtctggcaacccgtgccgccaaattagcaatggactatggctttaccgttctcaatctctataagctgtatctgatcgttgataaagagaatgaaaaagcgattcacatttaccgcaagcttggcttttcggttgaaggtgaattgatgcacgagttctttattaatggtcaatatcgtaatgccattcgcatgtgtatattccagcatcagtatctggcagagcacaaaacaccgggtcagactctcctgaagccgaccgcacaatagcattaataataatcgatcgtatttttgatggtgtaaacccgttcgacggcgggttttactccttcatcaacaatgattagctgacagtccaccggattagcgtgactgtcatattcacagctctgttttacattaccaacccgttgattattcagtaaagtaaccgctgtgtaatctaattttttgatcggatccgttgatggcgtggcgctgacagataatgttttgtcgttacttttcgtggttttacccagcggataaccctgatcatcatagcgatattccatctgcatttgtttgctgctggctttaatcacgaagccattatcatcggtttcccaactcaccccggcagaaggtaattctgctagctggcattttccctgtaaacgtactctcttctccagcgtctcggcatcacggtaataattggcgtccagtaccagagcgaccacggtattattttccagatccagtaattcgagtgaatcaaaacagccttcttccgacaaagtcccagaaacacgtttcgtcacttcaccttgctcatccattaatgtctgagtgaaatcttttaccggaccacgcagcggatcaaaatcgaattcattagagaaactggccatctcaggggtaaatgaaagtgttacctctgtgcggtcacatcctgtgaggaatatcgcgagtaagcatggtagtaatttgtatttcacaacagtcaccagagagtagagatgattctcaatcatagtagcaaatacagtactttacacgttaaatgctatgcttaaagaagttatcttcgcgtaaggagcttatgatgaaactctcaacctgctgtgccgcgcttctgctcgccctcgcctcacccgcggtactcgccgcgccgggatcctgtgagcgcatacagagcgatatatcacagcgcattatcaataatggcgtacccgaaagcagcttcacgttaagtattgtacccaatgaccaggttgatcagcctgattcccaggtcgtcggccattgcgctaatgatacgcataaaattctctatacccgcaccaccagcggtaacgtctctgctcccgcgcagtctagccaggatggcgcgcctgccgaaccgcagtaacacattatcgactgaacgccggatatgacaaatccggcgatttgaacatacaacataatcccaccttattactcatacccttctattgatatggattaataattcttaacccaaaatgggtagactccctctattgttagcgcgctaaatattcaatatataaacttttatataacgataaagaacagggagtgagttatgtccaaaaatgaacgaatggtgggcatcagccgcagaacactcgttaaatctaccgcgataggttctctggcgctggctgcaggcggtttttctttgccgtttaccctgcgcaatgcagcagcagcggtacaacaggcccgcgaaaaagtggtctggggtgcctgttccgtcaactgtggtagccgctgtgcacttcgtctacatgttaaagataatgaagtgacctgggtggaaactgacaataccggcagcgatgagtacggcaaccatcaggtacgcgcctgtttgcgcggtcgctccatccgccggcgtattaatcatcccgatcgcttgaattacccaatgaaacgcgtgggcaaacgcggcgaaggcaaattcgaacggattagctgggatgaagccctggatactatcgccagtagcctgaagaaaaccgtcgaacaatatggcaatgaggctgtatatattcagtactcttcggggatcgttggcggcaatatgacccgctcttcgccatcagcctcggcggtcaaacgcctgatgaactgctacggcggttcactcaaccagtatggctcctacagcactgcgcaaatttcctgtgccatgccctacacctacggcagtaatgatggcaacagcaccacggatattgaaaacagcaagctggtcgtgatgtttggtaacaacccggcagaaacccgcatgagcggtggtggcatcacttatcttcttgaaaaagcgcgcgagaaatcgaacgccaaaatgattgttatcgatccgcgatataccgatacggctgccggtcgtgaagacgaatggctccctattcgcccgggcaccgatgccgcgctggttgcgggtattgcctgggtattgattaacgaaaatctcgttgatcaaccttttctcgataaatactgcgtcggctatgacgaaaaaaccttacccgcagatgcacccaaaaatggtcactataaagcctatattcttggtgaaggtgacgataaaacagcgaaaacgccgcagtgggcttcgcaaattaccggtatcccggaggaccgtatcatcaaactggcgcgtgaaattggcacagcaaaacccgcttatatctgccagggctgggggccacaacgccaggcaaacggcgaactgactgcacgcgctattgctatgttacctattttgacgggcaatgtcggcatcagcggcggaaatagtggcgcgcgtgaatcgacctataccattaccatagaacgcctgccggtgctggataatccggtcaaaacgtcaatctcctgcttcagctggacagatgctatcgatcatggtccgcaaatgacggcaatccgcgacggcgtccgcggcaaagataaactggatgtgcccattaagttcatctggaactacgcgggaaataccctcgttaatcagcattctgacatcaacaaaacgcatgaaattctgcaggacgaatcgaaatgcgaaatgattgtggtcatcgaaaactttatgacctcatcggcaaaatatgccgacattctgctgccagacctgatgaccgttgagcaggaagatattattcctaacgactacgccggtaacatgggatatctcattttcctccagcctgtcaccagcgaaaaattcgaacgcaaaccgatttactggatcctgagtgaagtcgcgaaacgtcttggacctgacgtctatcaaaagttcacagaaggtcgcacgcaggaacaatggttacaacatctgtacgccaaaatgcttgccaaagatccggcgttaccgtcttacgacgaactgaaaaaaatgggtatctataagcgtaaagatcccaatggccattttgtcgcctacaaagcatttcgtgacgaccccgaggcaaatccacttaaaacgccttccggtaagattgaaatttattccagcaggctggcggaaattgcccgtacctgggaactggaaaaagatgaagtgataagcccattgccagtttatgcctcaacctttgaaggctggaactcccctgaacgtagaaccttcccactgcaactgtttggtttccattacaaatcccgtactcactcgacctacggcaatattgatctcctgaaggctgcctgccgtcaggaggtgtggatcaaccctatagatgcgcagaaacgtgggattgccaacggcgatatggtgcgggtgtttaaccatcgtggcgaagttcggctaccagccaaagtaacaccacgtattctccctggagttagcgctatgggccagggagcctggcacgaggccaatatgtctggcgataaaatcgaccatggcggctgtgtgaatacgctaaccactctgcgcccttcaccactggcgaagggaaacccgcagcacactaatctggtcgagatcgaaaaaatataacccacgacaaccataaattctggcatgacattttgtttgaaaagcaataagtgagtaatgatgaaaatccataccacagaggcgctcatgaaggctgaaatcagccgtagaagtctgatgaaaacctccgcacttggcagtcttgcgctggcaagcagtgctttcactctgccattttcccaaatggtccgggcggcagaggctccggtagaagagaaagcggtctggagttcctgcaccgttaactgcgggagccgctgtctgttacgtttgcatgtgaaagatgacaccgtgtactgggtggagtctgatacgacaggtgacgacgtctacggtaatcatcaggttcgagcgtgtttacgcgggcgctctatccgccgacggatgaatcatcctgataggttgaaatatcccatgaagcgcgtcggcaagcgcggtgaaggtaaatttgaacggataagttgggacgaagccctggataccatcagtgataatcttcggcggatcctgaaagattacggcaatgaggctgtacatgtcctgtacggaacaggcgtagatggcggaaacatcaccaactcaaacgtcccgtaccgtctgatgaactcttgcggtggttttctcagtcgctatggcagctacagtaccgcacagatcagtgccgcaatgagttatatgttcggtgccaatgatggcaacagcccggatgatatcgccaatacgaaactggtcgttatgttcggaaataacccggcagaaacgcggatgagcggcggtggtgtcacttactacgtcgagcaagcccgcgaacgttcaaacgcacgcatgatcgtcatcgatccacgttataacgacactgctgccgggcgtgaagatgaatggctgcccattcgccctggcaccgatggcgcactggcctgtgcgattgcctgggtactgattactgaaaacatggtcgatcagccatttctcgacaaatattgtgttggttacgatgaaaaaacgctgcccgccaacgcaccacgtaacgcgcattataaagcctatattctgggcgaagggcctgacggcatagctaaaacgccggaatgggcagcaaaaatcaccagcatcccggcagaaaaaattatccagttggcacgagagatcggttcagcaaaacctgcttatatttgtcagggttgggggccacaacgacattccaacggcgagcaaacatcccgcgctattgccatgctttccgttctcaccggcaacgtcggcataaacggcggcaactcaggcgtacgcgaaggtagctgggatctgggggtagaatggttcccgatgctcgagaatcctgttaaaacgcagatttccgtctttacatggacagatgccatcgaccatggtacggaaatgaccgcgacccgtgatggtgttcgtggaaaagaaaaactggatgtccccatcaagtttttatggtgctacgccagtaacacattgatcaatcaacatggcgacatcaatcacacccatgaggtgcttcaggatgacagcaagtgcgagatgattgttggcattgaccacttcatgacggcctcggctaagtattgcgatatcctgttgcccgacctgatgccaacagagcaagaagaccttatctctcatgaatctgcagggaatatgggctatgtgatcctcgcccaacccgcaacctcagcaaaatttgaacgcaaacccatctactggatgctgagtgaagtcgccaaacgcttaggaccagacgtttatcaaacctttactgaaggtcgcagtcagcatgaatggatcaaatatctccatgcgaaaacgaaggaacgtaaccctgagatgcccgactacgaggagatgaaaacgaccgggatctttaagaaaaaatgcccggaagaacactacgtcgctttccgcgcattccgtgaagatccacaggcaaacccgttgaaaacaccttcggggaaaatcgaaatttattctgaacgactggcgaagattgcagatacctgggaattgaaaaaagatgaaattattcatccccttcctgcgtataccccaggttttgatggctgggacgatcccctgcggaaaacctatccactgcagttaacgggcttccattacaaagcgcgtacccactccagctacggcaatattgatgtgttacagcaggcctgcccacaagaggtgtggatcaaccccattgatgctcaggcacgcggtatccgtcatggcgataccgtgcgggtatttaacaataatggagaaatgctgattgccgcaaaagtgactccgcgtattctgcctggcgttaccgccatcgggcaaggtgcgtggcttaaagcggatatgtttggtgaccgggtcgatcacggcggcagtatcaatattctgacctctcaccgcccttcaccgctggcaaagggaaacccgtcgcacagcaatcttgtccagatcgaaaaggtttaaggagtagcccatgaccacacaatatggattttttatcgattccagccgctgtactggctgtaaaacctgcgaactggcgtgcaaagattttaaagatcttggcccggaagtcagtttccgccgtatttatgaatacgctggcggcgactggcaggaagataatggcgtctggcaccagaacgtgttcgcttattatctctccatctcctgtaaccattgcgatgaccccgcatgtacaaaagtctgccccagcggcgcaatgcataagcgtgaagatggctttgtggtggttgatgaagatgtttgtatcggctgccgctactgccacatggcttgtccgtacggcgcgccacagtacaatgctgaaaaagggcacatgacgaagtgcgatggttgttattcgcgcgtcgccgaggggaaacaacccatatgtgtcgaatcctgcccgctgcgtgcacttgagttcggtccaattgaagagctgcgccagaagcacggcactcttgctgccgtcgcgccactgccgcgcgcgcatttcacaaaacccaatatcgttatcaaacctaacgccaacagccgcccgaccggcgataccactggttatctggctaatccggaggaagtgtaaaatgggaaatggatggcatgagtggccactggttatctttaccgtattgggtcaatgcgtagtaggcgcgctgattgttagcggaattggctggttcgccgccaaaaatgacgcagaccgtcagcgtattgtccgtggcatgtttttcctctggctgttgatgggcgtcgggtttattgcctctgtcatgcacctgggatcgccactgcgggcgtttaactccctgaatcgaatcggagcttctggtctgagtaacgagattgctgccggttccatattttttgccgttggcggattatggtggctggtggcagtcatcggtaaaatgccgcaagcgttggggaaactctggttacttttcagcatggcgctcggcgtcattttcgtctggatgatgacctgcgtgtatcaaatcgacaccgtgccaacctggcataacggttacactacgctggctttcttcctgacggtattgttgagcggtccaatacttgctgccgcaattctgcgggcagctcgcgttacatttaataccacaccatttgccatcattagcgttctggcgctgatcgcttgtgccggggtgattgtgctgcaaggtttgtctctggcgtctattcactcatccgtgcaacaagccagcgcactggtaccagattacgcctccttacaggtctggcgtgtggtattgttatgcgcaggtcttggatgctggctttgcccgctcattcgtcgccgtgaacctcacgttgccggacttattctggggctaatcctcatacttggcggtgagatgatcgggcgtgtgctcttttatggcctgcacatgacagtaggaatggctattgcaggttaacaaattggtgcggggcaacccgcacatttcaggatgttaggaatgacccatttttcacagcaagataatttttctgtcgcggcgcgcgtgttgggcgcgctgttttattacgctccagagagtgcggaagccgcacctctggttgcggtactcaccagtgacggctgggaaactcagtggcctctaccagaagcgtcattagcgccgctggtgacggcttttcagacacagtgtgaagagactcacgcccaggcctggcagcgtttgtttgtcggcccgtgggcactgccgtctccgccgtgggggtcggtctggctggatcgcgaatctgtgctgtttggcgattcaacattggcacttcgtcagtggatgcgcgagaaaggcattcagtttgaaatgaagcaaaacgaaccggaagatcattttggttcactgctgttgatggctgcgtggttggcggagaatggtcgccagacagaatgcgaagaattgctggcatggcacctttttccgtggtcaacacgttttcttgatgtttttatcgaaaaagcagaacaccctttctaccgtgcactgggtgaactggctcgcttaacgctggcgcaatggcaatcacaactgttaattcctgtcgcggttaaaccgctgtttcgataggatcaccgtaatattgccggatggtgacgattacgcgcaatccggcaataataggttacagtgtcacgtttttttatctcttaaagcacgcactgcttttgcggctggcctcttttgccgcaaaatagtcgcccgtgtttcattgcccatttctgctcatgcatcatctacacatctatccggatctgcgcactatgttccaccgtctgcttatcgcaacagtcgtcggtattctcgcggcctttgccgttgccgggtttcgtcatgcgatgctgctactggagtggttgttcctcaataatgactccggcagtctggtcaatgcagcgacaaacctttccccctggcgacggttgctaactccggcgctcggcggactggcggcgggtttgttgctgatgggctggcagaaatttacccaacaacgccctcatgcgccgaccgattatatggaagcgttgcaaaccgatggacagttcgattacgcagcaagcctggttaaatcgcttgcctctctgctggtagtaaccagcggcagtgcaattggtcgcgaaggtgcgatgattcttttagctgcccttgccgcctcctgttttgcccaacgttttacgccacgccaggagtggaaattatggatcgcctgtggggccgcggcgggaatggctgcggcctatcgtgccccgcttgctggcagtttatttatagccgaagtgctgtttggcactatgatgttggcctctctcggcccggtgattatttccgccgtcgtggcattgctggttagcaatctgattaatcatagcgacgcgttactctacaacgtacaactctcagtgacggttcaggctcgtgactatgcgctgattatcagtacaggtgtgctggcaggtctgtgcggaccactgttgttaacgttaatgaacgcctgtcatcgtggatttgtgagtctcaaacttgcgccgccctggcaactggcactaggcgggttgatcgtgggtctgctttccctgttcacacctgcagtgtggggcaacggctatagcaccgtacaatcctttttaaccgccccaccactgttaatgatcattgccgggatcttcctttgtaaactgtgtgccgtgctggcgagtagcggttccggcgcacccggtggggtctttacaccgacgctatttatcggtcttgccattggcatgttgtatggtcgtagcctgggattatggttccctgatggcgaagaaattacacttttactcggattgaccgggatggcgacactgttggcggcgaccacgcacgcgccgattatgtcgacgttgatgatatgtgaaatgaccggggagtatcagctactccccggtttattgattgcctgcgtaattgcgtcggtaatttcgcggacgttacaccgtgactctatctaccgccagcacactgcgcagcatagctaagcggatgtattgccccagttcacgctgttcggcgcgcggcagataaggcagttcaccaatgagcggtgccggaagttttttacccagcacatcaatgatttccgcataatgcgccagtcctgggttgattcggttagccacccagccaatgagcggcagcccgtcgttggcgatcgcctgagctgttagcagtgcatggttaatgcaaccttcctgaataccgacaaccatcaacaccggcagttgttcctgcactacccattcagagagtggacgcaaatcattcatcagactgcgccagccgccagtcccttctaccacgacatgatcgactttttcggtcaggtttgccaggccgtttgaaatgagggtgtaattgattgggcaactgtgcgccacgctactttcttcttcgcttaacgcgataggattaactgcttcataaggcagttcgatggttgaaacactctgcaacaccagggcatctttattacgcagcccttcgggtgtctctttgctccccttcgctacgggtttatatcccgcaaccgtttttccctgggaggctaacgcttgtagcaatgcgcgggaaaccaccgttttccctacagaagtgtctgtaccggtaataaagaaacgcttcagcatcactaactccaccgttatgcttcacaaatataaaccaggaaaataattaaccttgaaagtctaagttatgctttcctggcccaaattgagatagcgcaaattttggtagaacagttaaaaaatgttaaccctgcaacagacgaatcaacaaagaaccgttatacatcgcgtcttttaccagtgcagcgcctgccatcgtgccctggttagaaaactgagtactctcaacgctgatgtgctgactatacgcaggaagggcctgctgacggatgctgtctgagatgaccgggaagaggatatctgccgctttacttaacggtgagccaatcagtattttttgtgggttaaataaattcaccatgatggcaagaatgcgcccgacatgcgcgcccaccccggtaatgatgtcttttgccagtagatcgccgcgcaatgccgcctgacacaatgagtccacggttaacggttgtccatgtaacatcgagctcatggattgattaagacgcagctgtgccagctcaagaatactgtccacgctggcgatggtttcgaggcagccgtgattcccgcaataacagcgtttcccatacgggtcgacctgtgtgtggcctatttccacgagactactgctgcctgcgtgtagcagatgaccatcggtaatgacgcccgcccccacgttgtgatcgataaccacctgaatcacatcgcgcgccccgcgtgaggcaccaaacaaggcctctgccatcgtccatgcgctgatatcatgctgaatataaaccggaacgccggtatgctgctccagcgcctcgccgagcggcatctcttttacatcctcgtagaacggcatgcgatgtacaataccattttccgtatcaataattcccggcaaggttatggcaatcgaagttagacgctcaagttttttctggtggcggataaaaaactgatcgatatgggaaataatacgatccagcaatggcaagtcatcttttaacgccagttcctgcgactcttccaccaccagtttgctgctcagatcgcgcagagcaaggaaaatctccccgcgactaatgcgcagagaaagatagtgccaggcttcagtttcaaccaccagccccaccgccggacggccacggttccccgcttctttgatttccagctcttgcaccaggtgtgcttcgagcatctcacggacaattttagtgatactggcaggagccagttgcgccagacgggaaagatcgatacgcgagactggaccaagctgatcaatcaggcgataaaccgcgcccgcgttggtctgctttatttgatcaatgtgcccaggctggttttcagcaaccaccgcatactccctatattttcgcgctccgaaataatctgtaggctatggtgaagcacttcaatacgtgtcgtcaaatttttacttaggcatgtgattaacagcacatttttcgggctttttcgctgaaatttccctcacctgagagcattcagcagatgaatacgaaagttacgcgcagccggactttgttcatgatgtttcggccagaccaaccacatttcagaaaccgcatcctcttcagcaatcggcacccagcgcatttcgttgagctgaacacgtttaaatgacgcaggcaaaattgaaacacccagaccggcggaaaccagaccgatgatggtcattgcctcgcccacctcctgagtgatgacgggcgtcaaatggtaacgtcgcatcagcccgagaatatcgtcatacagccctgtcccgacgtgcggatcaaaaaagacaaagggttctttcgccagttcagccagcgttacattcgggttatttgccaggggatgatcgtgcgggatcatcgccataagcggttcatggacgatgactgcgtgttcaagcgactccggtaacgctgtgttacgcagcaatcccatatccagcgttccttcaatgagcggagcgatttgctcgcgagtgttcatttcgcgggtttgtaaatggacatcaggataatcacggcgaaacagcgataacgtatcggacaccgcccgaataaaaggagccgacgaagtaaaaccaatgcgcaactcccccgcttcaccctgatgcagcctttcagcgcgagcggcagcgtcatccaccatagacaggatttgccgactatctgcaagaaactgttttcctgctgccgtcagcaatacactgcgattggttcgtgccagcagtcgggcaccaatttgttgctccagcgcctgaatctgctgacttagcggcggttgcgaaatattcaggcgggcagcggcgcgcccgaaatgcagctcttccgcaacagcaacaaagtaacgcagatgacgaagttcaatattcatatttaaaacatcttatttgagattattaatatattagacagaacaattcgattttcctaccctatgtataagcctgatctacaggcatatttagcaaggatttcaagtgagccgtactacaactgttgatggcgctccggcaagcgacactgacaagcaaagcatttctcagccaaatcaatttattaaacgcggtacgccgcaatttatgcgcgtcaccctggcgctgttctctgccggactggcaacatttgcacttctctattgtgtgcagcctatccttccggtgctttcgcaggagtttggcttaacccccgcgaacagtagtatttcactgtccatttccacggcgatgttggctattggtttgctgtttactggcccgctatccgatgccattggtcgcaaaccagtgatggtcacggcgctactgttggcctccatttgtacgttactttcgacaatgatgaccagctggcacggcattttgattatgcgcgccttgattgggctttcgttaagtggcgtggcagctgttggcatgacttatcttagcgaggaaatccatcccagtttcgtggccttttcaatggggttgtatatcagcggcaactcaattggcggcatgagcggacgcttaattagcggtgtcttcacggactttttcaactggcgaattgctctggcggcaatcggttgtttcgcgctggcctcggcgttgatgttctggaaaatcctccctgaatcacgccattttcgcccgacttcgctgcgccctaagacgttgtttatcaactttcgtctgcactggcgtgaccggggattaccgttattgttcgcagaaggctttttgctgatggggtcgttcgtcacgctgtttaattacatcggctatcggttgatgctctccccctggcatgtcagtcaggccgtggttggcttattatcgctggcttatttgaccggtacatggagctcacccaaagccggaaccatgaccacccgctatgggcgtggtccagtgatgttgttttcgacgggggttatgctgtttggtttactgatgaccttattcagctcgctgtggctgatctttgccggaatgttactcttctcagcaggattcttcgcagcccactcagtagccagcagctggatcggcccccgcgcaaaacgcgctaaaggccaggcctcctcgctgtatctgttcagttactatctggggtcgagtattgccgggacgctgggtggtgttttctggcataactatggctggaacggcgtcggcgcatttattgctctgatgctggtcattgctctgctggtcgggacgcgtttgcatcgtcgtctgcacgcctgaaaaataagtccggactgcggtaaatacccgtccggacttattgccagctcaaaccaacgttaatagccatcctaaaatagacgaagcgccagccaattcccgcagcgcgtctagcgtcatcaggattataagtacccaaataaacggattcattttgctgtgtgtcatttattactgatgcgcagttattctactgctttgtaagtagtaaaatagttaacccgatcaagactactattattggtagctaaatttcccttaagtcacaatacgttattatcaacgctgtaatttattcagcgtttgtacatatcgttacacgctgaaaccaaccactcacggaagtctgccattcccagggatatagttatttcaacggccccgcagtggggttaaatgaaaaaacaaattgagggtatgacaatgaaaaaagtattagctctggttgttgccgctgctatgggtctgtcttctgccgcctttgctgcagagactacgaccacacctgctccgactgcgacgaccaccaaagcagcgccggcgaaaactacacatcataaaaaacagcataaagcagcacctgcccagaaagcgcaggcggctaaaaagcatcataaaaatacgaaagctgaacagaaagcccctgaacaaaaagcgcaggcagcgaagaaacacgccaagaaacacagccatcagcaaccggcaaaacctgctgcacaacccgcagcgtaagttttcaacagtaatgctggcgcgccccctcgcgcctgaaaattacggtgctaagcgggtaacgtttagcaccgcctttagcggagggtagtatggtgggccgttatcgctttgagttcattctgatcatccttattttatgcgcactgattaccgcccgtttttatctttcctgattgtagttatctgattttactcccactttcatcccgtcccgtctatagtatttatgagggtttgcttttaataatcataattacccaccagagtgtgatatgcgtacaaccattgctgtagtgttgggtgcaattagtttgacgtctgcttttgtgtttgcagataaaccagacgttgccagatcggcaaacgatgaggtcagcaccctgttttttggtcatgatgatcgtgtgccagtgaatgacacgacccaatcaccgtgggatgcggttgggcaactggaaacggccagcggcaatttatgtacggcgacgctgattgcacccaatctggcattaacggcaggacactgtttattgacacctccaaagggtaaagccgataaagcagtggcgctgcgttttgtgtcaaataaaggtctttggcgctatgagatccacgacatagaaggccgcgttgatccgacactgggaaagcggttaaaagcagatggggatggttggattgtacctcccgcagccgcgccgtgggacttcggattgattgtgctacgtaatcccccttctggcattacgccgttgccgttatttgagggagataaagccgcgcttaccgccgcattaaaagcggcaggtcgtaaagtgactcaggcaggctaccctgaagatcatctcgatacgttgtacagtcatcaaaactgtgaagtgactggctgggcgcaaacgtcggtgatgtcacatcagtgcgataccttgccgggtgacagcggttcgcctctgatgttgcataccgatgacggctggcaattaattggggtgcaaagttcggctcctgccgcgaaagatcgctggcgcgccgataaccgggccatttctgttaccggttttcgcgacaagctggatcaactgtcgcaaaaataatgttcaaacgctgcccgacagcgcgggcagcgtcttcatcaggcaagtttcaccatgatcattccagccaacagcaagaccaggccaatccagcctttacgatttaaccgttgaccaaacaagatccaacctgcggctaacgtggcggcaataccaaacccgccccacaatgcataagcgacagacaagtcgatccctttaacggcttgagaaagcgcactaaaggcagccagcaccgccgccagggagagcaagccaaatattttgcgacgaaagccgtcagaaaatttcaaaaagacgttagcaacgatttccagcacgattgccaatgccagccaggcggcgtgaacccattcaaactgcgccatggttcacctccagttcaggtttacgcgctttacgggtacctgattttatcaacacaatcccggcgaccagggtggttaacccggcaattttcatcagcgataaactttcgtcgaataacaaaacgctaaacaaggtaataaataaaataccgataccttcccacagcgcataagctacgcctaaggcgatttttttaacggcgaaagagagaaatatatacgacagagaaatcatcaccagcattaaaataaagccgccatttccctcactgacgctcgcccatttcattgacagcgtaccggtaatttctgtagcaatagccagacctaataaaatccaataaatatacattgtccttctcctgcaagagaattattttaattttcgcttaattcagcgaaaccaaagtaaagtggtcaagccccgcgcatagcgcaagctttggcagaagaaaggactaaagcgcgttgcgccagtgctgctcacctacgagcaagatagtggatgaggtacgaagatgggtaaatgtagaaaataacgtcctgaacaaattgtccataatattacaattatccgcagtgttgcttctcgtcatcgcggatgataattgtcctcggtagttgaacacgcctgatttgtatcatagcttaagaattaactcaaaatattttcacttctttacctgagcggtttgattttcgttatgatgacggagcgaaaaagacattattattagcaaaggaagaaaaaacggggacaagcatggcaaagccgatcatcacgctcaatggcctaaaaatcgtcattatgttgggaatgctggtcattattctctgcggtatccgttttgccgccgagatcatcgtgccgtttattctcgcattatttattgctgttattcttaacccgctggtgcaacacatggtccgctggcgtgtgccgcgtgtactggcggtgtcgattttgatgaccatcatcgtgatggcgatggtgttgctattagcttatctgggttccgcgctcaacgagttgacgcggacgttaccgcaatatcgcaactctattatgacgccgctgcaagcgcttgaaccgttgttgcaacgcgtagggattgacgtctcagttgaccagctggcgcattatattgatccgaacgcggcgatgacgttgctcaccaacttattgacgcagttatctaatgccatgtcatcaatatttttattgctgctgacggtgctgtttatgctgctcgaagtgccacaattgcccggaaaatttcagcaaatgatggcgcgtccggttgaagggatggcggcgattcaacgtgcgattgacagtgtttctcattatctggtgctgaaaacagccatcagcatcatcaccggcctggtcgcctgggcgatgctcgccgcactcgatgttcgcttcgcttttgtctggggattgctggcctttgcgcttaattacatcccgaatattggttcagtcctcgcggcaatcccccctatcgctcaggtactggtgtttaatggcttctacgaagcgttgctggtgctggcgggatatctgctgattaatctggtcttcggcaatattctggagccgcgtatcatggggcgtgggctggggctttccacattggtggtatttttgtcgttgattttttggggatggttgttaggaccggtgggtatgctgctttccgtgccgttgacaattattgtcaaaattgcgcttgaacaaacagcgggaggtcaaagcatcgccgttctgttaagcgatctcaataaagagtgacggcctcagcagaggccgtcagggttacagagctttcaggattgcatccacgctggctttggcgtcaccaaacagcatgtgggtgttttccttgaagaacagcgggttttgcacaccagcatagccagtgttcatcgaacgtttaaagacaatcacgttctgcgctttccacacttccagcacaggcataccagcaatcggactcttcggatcatcctgcgccgccgggttaaccgtatcgttagcaccaatcaccagtacggtatcggtatcagcaaagtcatcattgatctcgtccatttccagcacgatgtcatacggtacttttgcttcagccagcaatacgttcatatgtccaggcaaacgccccgcgaccgggtggataccgaaacgcacattaataccacgagcgcgcaatttctcagtaatttcagcgacaggatattgcgcctgcgcgactgccatgccgtaccccggagtaatgatcactgaatgggagtttttcagcagttccgctgtctcttctgcggtgatttcgcggtgctcacccacttcctgatcatcgccagtagaagagccgtcggtgccgaaaccacccgcaataacgctgataaaggaacggttcatcgccttacacataatgtaagaaaggatagcccccgaagaaccgaccagcgcaccggtcacaatcagcaggtcgttgctgagcataaagcccgcagccgcagccgcccagccggagtacgagttcagcatcgacaccaccactggcatatctgcaccaccgatggaggcgactaaatgccagccgaataccagcgcaattgcggtcattatcagcaatgccagcacttgcaggccgacgctgtccgtgcgaacaaatacaatcagcagcaggaaggaaacgaccagagccgccaggttcattttgtgacggtttggcagcatcaatggtttagacgaaatcttgccacacagtttgccgaacgccaccaccgaacccgtgaacgttaccgccccgatgaagataccgaggaacacttccgtcaggtgaatattgaccagaatcggtgccattcccgcgtcatgatgcagatagctgttaaagccaaccagcactgccgccagacccacgaagctatgcaggatcgccaccagttctggcatttcggtcatttcaactttcttcgccagacggataccaattgccccaccaatgaccatcgccagcaagatccagccaacattacccgtatccggtccaaaaatggttgcgattaacgcaatcgccatcccggcgataccgaagttgttaccctggcgagacgtttcatgtttcgaaagaccggccagactgaagataaacaggatcgcggcaacaatgtatgcagctgtaactaatcctccagacatatgttaccccttaatttttgcggaacattttcagcatgcgctgagtcacggtgaagccaccgaaaatattaatgctggctataagcaccgcgataaaactaaggaagctaacccagccgccctggccaatctgcaacagtgctccgacaacaataatccctgaaatcgcgttggtgaccgacatcaacggtgtatgcagcgcgtgcgatacattccacaccacgtaataaccgacaacgcaggccagcgcgaaaacggtgaagtgcccaaggaattctttcggcgcaacgcttgccatccagccaaaaagaatgattgccagcgccatcaacgcgtatttacgccacggtgagcaggtacatttttcctcagttttcacttccggtgccgctttttgtgccgcctgcggctgagctgatacctgaatcggcggtgccggccaggtaatttcgcccgcacggatcacggtcacgccgcgaatcaccacatcatcaaaatcaacagtgatattgccgtctttctctttgcacaacagtttcagcagattaacgaggtttgtgccgtaaagctgtgaggattgcgtcggcagacggcccggaagatcggtataaccaatcactttgacaccattttccgtagtgaagatttcacccggcacggtgtattcacagttgccgccgttttgggctgccaggtcgacaatcacactgcccgccttcatggagtcaaccatttcacgggtaattagcttcggcgctggtttgcctggaataagcgcggtggtgacaatgatatcgacctcttttgcctgggcggcaaagagttccatttccgctttgatgaacgcgtccgacatcactttggcatagccatcgccgctgccagcttcctctttaaaatccagctcgaggaattccgcgcccatactttgaacttgttctttcacttccgggcgggtgtcgaatgcacgcacaatcgcgccgagactgtttgctgcgccaatggcggccagacctgcaacacccgcaccaatcaccatcacttttgccggtggcactttcccggccgcagtaatttgcccggtaaagaagcgcccaaattcatgtgccgcttcaacaatggcgcgataaccggcgatgttcgccatcgagcttagtgcgtccagcgattgtgcgcgtgagatacgcggcacagagtccatcgccatcacggtcacgttacgttccgcaagtttttgcattaattccggattctgcgcaggccagataaaactcaccagcgttgtcccaggattcagtaacgcaatttcatcatctaacggcgcattgaccttcagaatgatctctgactgccagacgctattcccttctacaatttcagcgcccgcttgcacaaacgctttatcgtcaaaacttgccagttgacccgcgccgctctctaccgcgacggtaaaacccagtttcagcagctgttccactgtttttggcgttgctgcaacacgggtttcattggttaaccgttctcttggtatgccaattcgcatgatattcccttccatcggttttattgatgatggtttgcctgtgtcaggagccacacaagctgctcatgtacgagctaaatgttactccgttaaaataaattagtaacaaacgccctataacgtactgaaaattatgcctgtgatctagcgccaaaaatcagtatttcggcgtgaactcgcaaaatattaacgattcagccgtgatagtgggataaacaccttagaacgccggataaagactgataattgtcttcgacggtcgggtaaaacgagacatcgccccggcacgaatcactacttaacattaaattaacttatacaattcagttgcttcagtagtaatgatgctgatacggctgttttttaagcatagacggtcatttgagcaggattaaaattggcttaaggaatgtgatatgaaaaatgacgcagacagttacaccgtttaaatgcaataatcagccacgtttctcgttaataacaataccagtacctggtttgcgcaaggcgaaggattatttttatgaagcttaagaacaccctcctggcgtcggcactgctttctgctatggcattctccgttaacgcagcaacagaactgacaccggagcaagcggcagcggttaaaccttttgaccgtgtagtggttaccggtcgttttaatgctattggcgaagcggtgaaagccgtttctcgtcgcgcagataaagaaggtgccgcctctttttatgttgtcgacacttctgattttggtaacagcggtaactggcgtgtggtcgctgacctctataaagccgatgctgaaaaagcagaagaaacaagtaatcgcgtaattaacggtgttgtcgaactgccgaaagatcaggctgttctgattgaaccgtttgacacggtcaccgtccagggcttctatcgtagccagccagaagtcaatgatgccatcaccaaagcggcaaaagcgaaaggtgcctactctttctacatcgttcgtcaaatcgatgccaaccagggcggcaaccagcgtattactgcattcatctataaaaaagatgctaagaaacgtatcgtccagagcccggatgtgatcccggcagattccgaagcaggacgtgcagctctggctgccggtggcgaagccgcgaagaaagttgagatcccgggtgttgcgactaccgcatcaccaagttctgaagtcggtcgcttctttgaaacccagtcatcaaaaggcgggcgttacaccgtcacgctcccggatggcactaaagtcgaagaactgaacaaagcgaccgcagcgatgatggtcccgttcgacagcatcaaattctctggcaactacggcaacatgaccgaagtctcctatcaggttgcgaaacgtgccgcgaagaaaggtgctaagtattaccacatcacccgccagtggcaggaacgtggtaataacctgaccgtcagcgcagatctgtataaataactattcagttactcctataaggcggcttgatgccgcctttcgcatttttagtcacaaatttccccgcgaccattgcatgcagacacatctcttcgtaaaatcccgcgcttcagtggcaaactccatttttatgcgttttgccctaatatttattcttcttatcacgttttaatcactggatatcgatggaaaagaaactgggactgagcgcactcaccgcgctggtattaagctcaatgctgggcgcgggtgttttcagtctgccgcaaaatatggcggcagttgccagcccggcagcactgctcatcggctggggtattactggcgctggcattttattgctggcctttgccatgctgatcctcacgcgcattcgtcccgaacttgacggcggtatctttacctatgcccgcgaagggtttggcgagctaatcggcttttgttccgcatggggatactggctgtgcgcagtcatcgccaacgtctcctatctggtgatcgttttttccgcgttaagcttttttacggacacgccggaattgcgcctgtttggcgatggtaatacctggcaatcgatagtcggtgcatcggctttattgtggattgttcactttttgatcctgcgcggggtgcaaaccgctgccagcattaacctggtggcgacactggcaaaattgttgccgctgggtctgtttgttgtgctggcgatgatgatgttcaaactggataccttcaagctcgacttcaccggacttgcacttggcgtacccgtttgggaacaggtgaaaaacaccatgctgatcaccctgtgggttttcattggtgtggaaggtgccgtggttgtttctgcgcgtgcgcgtaataaacgtgatgttggcaaagcgacactgctggcggttctctccgctctgggcgtttacttgctggtaacgctgctttcgctgggtgtggtggcacgtcctgaactggctgaaattcgtaacccgtcaatggccggtctgatggtggaaatgatgggaccatggggcgaaatcatcatcgctgccggtttgatcgtttccgtttgcggcgcgtacttaagctggaccatcatggcagcagaagtaccgttcctggccgccactcataaagcattcccgcgcatttttgcgcgccagaacgcacaagctgcgccatccgcctcactgtggttgaccaacatctgcgtgcaaatttgtctggtactcatctggctgaccggttccgattacaacacgttgctgaccatcgcctcagaaatgattctggtgccctatttcctggtcggcgcgttcttgctgaaaatcgcaacccgtccactgcataaagcggtaggtgtcggtgcctgcatttatggcttatggttattgtacgcctctggtccaatgcacttgctgttatccgttgttctgtatgcaccggggctgctggttttcctgtacgcgcgcaaaacgcatacccatgataatgtactgaaccgtcaggaaatggtgctgattggcatgctgttaattgcctcagttccggcgacctggatgctggtgggataacgttcatcccatcgttggatagcaaaggagataacgatgggtaaaacccagcccttgccaatattaattactggcggaggtcgtcgcatcggcctcgccctcgcatggcatttcattaatcaaaagcaaccggtgattgtcagctatcggacacactatccagccattgatggactgattaatgcaggtgcgcagtgtattcaggctgatttttcgaccaacgacggtgtgatggcgtttgccgatgaagtactaaaaagcacccatggtctgcgtgctattttgcataacgccagtgcgtggatggcggaaaaaccgggtgcgccactggccgacgtactggcttgcatgatgcagatccacgttaataccccatacctgctcaaccatgcgctggaaagattactgcgtgggcacggacacgccgccagcgatatcattcactttaccgattatgtggtggagcgcggtagcgacaaacatattgcgtatgctgcaagcaaagcggcactggataatatgacccgctcgtttgcccgcaagctggcaccggaagtgaaagtgaattctattgcgccatcgctgatcctgtttaatgaacatgatgatgccgaatatcgacaacaggcgctgaataaatcactgatgaaaaccgcgcctggcgagaaagaagtgatcgacctggtcgattacttacttaccagttgctttgtcaccggacgcagtttcccacttgatggcggtcgtcatctgcgttaatgcagctttatccagcatataatcaacacccatgcgcttatcccccaacacgcaacagaaccaacaaaagcggcgggcaagcgcatcattccggtgaaataccacagcgacaccaggtaaacaaaatagggaataatcgaccacatactaaaaatgatggttgcgcgtaaggcttcaatgccgcgttcgctggcaacaatataatgcgcgataagcgcaaaggtcgggaaaagtggaatcagcccggcgatataataatttttcgtttttgctaaaacaccaatcaacagcactaccagcgcaccgagcgcggctttgattaccagccccatctttttaccttaacacttccataacaagtcatcagtagaatacctgatgaaaacttgtttagaaacgattgatagtaagtaaaaacagcgcggtgtattgtgacgtttttatatctaccgtgaatgttatgaacactatcgtatttgtggaagatgatgcggaagtcggttcactgattgccgcgtacctggcaaaacatgatatgcaggttaccgtagagccgcgcggcgaccaggccgaagaaaccattttgcgagaaaatccggatttggtgttactcgacatcatgctaccaggcaaggacggcatgaccatttgtcgtgatttacgcgcaaagtggtctggaccgattgttcttctaacctctctcgatagcgatatgaaccacatcctggcactggaaatgggtgcctgcgactatattctcaaaacgacgccccctgctgttttgctagcgcgtttacgtttgcatttgcgtcagaatgagcaagccacactgaccaaaggtcttcaggaaacgtctctgactccctacaaagccctgcatttcggcacgttgaccatcgatcccatcaaccgcgtagtcaccctggctaacactgaaatctcgctctcgacagctgatttcgaattattgtgggaattagctacccatgccgggcaaatcatggaccgcgatgcattgctgaaaaatttacgcggcgtcagttatgacggactggatcgtagcgtggacgtggctatttcgcggttaagaaaaaaactgctcgataacgccgcagaaccttatcgcattaaaactgtgcgtaacaaaggctatctttttgcgcctcatgcatgggaataagcgatgaaaaaactgtttatccagttttacctgttattgtttgtctgcttccttgtgatgtctctgctggttgggctggtgtacaaatttaccgccgaacgcgcgggcaaacagtcgctggatgatttgatgaacagttcgctgtatctgatgcgcagcgaattgcgtgagatccccccacacgactggggtaaaactctgaaagagatggatttaaatctctctttcgatctgcgtgtcgagccactgagtaaataccatcttgatgatatttccatgcaccgactgcgtggcggcgaaattgtcgccctggacgatcagtacacgtttttgcagcgtatcccgcgcagccactacgtgctggcagttggtcctgttccttatctttattatctccatcagatgcgattgctggatatcgccctgatcgcttttattgctatttccctcgcctttccggtgtttatctggatgcgtccgcactggcaggatatgttaaaactggaagcagcggcgcaacgatttggcgatgggcatctcaatgaacgtatccactttgatgagggttcgagctttgaacgacttggcgtcgcatttaaccagatggcggacaatatcaacgccttaattgccagcaaaaaacagcttattgacggtatcgctcacgaactgcgaacaccgttagtgcgcctgcgttatcgactggagatgagcgataacctgagcgccgccgaatcccaggcgttgaatcgtgatatcagtcaacttgaagctttaattgaagagctgctgacttatgcccgactcgatcgcccacaaaacgagcttcatcttagcgaaccagacctgccgttgtggctgtcaacgcatctggcagatattcaggcagtaacgcccgataaaacggtacggataaaaacgctcgtgcaaggccattatgcggcgttggatatgcgcttaatggagcgcgtgctggataatttgctcaataacgccctgcggtactgccattcaacggttgaaaccagcctgctactgtcggggaatagagcgacattaattgttgaggatgatggcccagggattgccccagaaaaccgcgaacatatctttgaaccttttgttcgcctcgatcccagccgggatcgctcaaccggcggctgcgggctggggctggcaattgtccactctatagcactggcaatgggcggtacggttaattgtgacaccagcgaactgggtggtgcccgcttctcgtttagctggccgttatggcataacatcccgcaatttacctctgcctgacactacgcgcacgatggtcaagtcaccacgactgtgctataaaataagtatgttgtaactaaagtggttaatattatggcgcgttacgatctcgtagaccgactcaacactacctttcgccagatggaacaagagctggctatatttgccgctcatcttgagcaacacaagctattggttgcccgcgtgttctctttgccggaggtaaaaaaagaggatgagcataatccgcttaatcgtattgaggtaaaacaacatctcggcaacgacgcgcagtcgctggcgttgcgtcatttccgccatttatttattcaacaacagtccgaaaatcgcagcagcaaggccgctgtccgtctgcctggcgtgttgtgttaccaggtcgataacctttcgcaagcagcgttggtcagtcatattcagcacatcaataaactcaagaccacgttcgagcatatcgtcacggttgaatcagaactccccaccgcggcacgttttgaatgggtgcatcgtcatttgccggggctgatcacccttaatgcttaccgcacgctcaccgttctgcacgaccccgccactttacgctttggttgggctaataaacatatcattaagaatttacatcgtgatgaagtcctggcacagctggaaaaaagcctgaaatcaccacgcagtgtcgcaccgtggacgcgcgaggagtggcaaagaaaactggagcgagagtatcaggatatcgctgccctgccacagaacgcgaagttaaaaatcaaacgtccggtgaaggtgcagccgattgcccgcgtctggtacaaaggagatcaaaaacaagtccaacacgcctgccctacaccactgattgcactgattaatcgggataatggcgcgggcgtgccggacgttggtgagttgttaaattacgatgccgacaatgtgcagcaccgttataaacctcaggcgcagccgcttcgtttgatcattccacggctgcacctgtatgttgcagattaacgcccggctttcatactgccgaccatctgttctggccgtacccagctgtcaaactcggcttcgctaagataccccagcgcaagggccgcagcttttaaggtcagcccttctttatgcgcttttttggcgatctcggcggctttgtcataaccaatgtgggtgttaagcgcagtcaccagcatcagcgattcattgagtaattgattgattcgctcacgattcggttcaatacccactgcgcagtgtttgttaaaactttccatgccatctgccagcaagcgcaccgattgcaggaaattgtggatcaccattggacggaagacgttcagttcaaagttaccggaagcgccccccatgttgatcgccacgtcgttccccatcacctgacagcagagcatggttaatgcctcacactgtgttgggttcactttccccggcatgattgagctgcccggctcattttccgggattgagatttcaccaattccgcagcgcgggccagaggccagccagcggacatcattggcgattttcatcagtgacgcagccaaccctttcaacgcgccgtgcgcctgaaccagggcatcacaggtcgccagcgcttcaaatttgttcggcgcggtaacaaacggtgcacaggtaatgactgccagttcatctgctacgcgacgcgcatactccggatgggtatttagtccagtacccaccgctgtaccgccaagagccagttccgctacgtgaggcaggctgtattcgatatgtttgagattatgctcgagcatcgctacccagccggaaatctcctgccccagcgttaacggcgtggcatcctgcaagtgagtacgaccaattttgacgatatcggcaaaagcacgggatttctcattcagtgtctgtgtcagggttttaagctgaggaatgagttgcttgcgcagcgccagcagcgccgcaacgtgcatcgccgtcggaaagacatcgttggaactttggcttttgttcacgtcgtcgttagggtgaactttacgttccatcccgcgcacaccgccgagtaattcactggcccggttagccagcacttcgttcatgttcatgttactttgcgtgccggagccggtctgccagatagccagcgggaattcgtcgtcatgctgtcctgccagtacttcatccgccgcctgacgaatggcgctcgctttctcttcagacaacaagcctaaatcttcattaacttttgccgctgcacgcttggttagcgccagcgcatgaatcagtgaggtgggcattttctccgtcgaaatgcggaaatgctccagcgagcgttgagtttgtgcgccccacagcttatctgccgggacatcaatcgcccccatcgaatctttttcgctgcgtactgtattcatgacctgctcctcacctgattaattttttctttctgttttgctttcgttaagcaacttttagctcacttattatttaccatttgataacaaatgtttggtctttcgtgccatgtaaaaaaaccgccccgaagggcggctctgtttatttcacacagcgggtgcattgtgtgagttgtatctgctggaagaagtcatttcctttatcatccacaaggataaacgccgggaaatcttccacttcaattttccagatggcttccattcccagttccggatattcaacacattccaggctcttaatacttccctgcgccaatacagcggccggaccaccgatactgccaaggtagaagccgccgtgttttttacaggcatccgtcacctgctggctgcggttgcctttcgccagcatgatcatacttccgccctgcgcttgcagttgatcgacataagaatccatccgtccggcggtcgttgggccaagagaaccggaggcataaccttccggcgttttggccggacccgcgtagtaaatcggatgatctttgatgtactgcggcagcccttcaccgttatccatccgctctttcagtttggcgtgagcaatatcacgaccgacgataatcgtgccgttaagcgataagcgtgtagaaacgggatactgcgacaactgtgcgaggatctctttcatcggacggttaaggtcaacgcgcaccgcttcgccttctcccgctttgcgcagctcttccgggatatatttgcctggattatgttccagtttttcgatccagatcccctgacggttgatcttcgctttgatattacggtcagcagagcaggagacgcccataccgaccgggcaggatgcgccgtgacgtggcaggcgaatcacgcggatgtcgtgagcgaagtatttaccaccaaactgcgcacccagaccaagattttgcgcttcgatcagcaattctttttccagttccacatcgcggaacgcctgaccgtgctcattcccttccgttggcagttcatcatagtatttcgcggaagccagtttcaccgttttaaggttcgtttctgcagaagttccaccaataacgaacgcaatatgatacggaggacaggccgccgtacccagcgtgcgcatcttctcaaccaggtaatttttcagtttccccggcgtcagtaacgctttggtttcctgatagagatacgtcttgtttgccgaaccaccacctttggcgatacagaggaatttgtattcgtcgccatcaacggcataaagatcgatctgcgctggcagattggtgccggtattcacttctttatacatatccagcggcgcgttttgcgagtagcgcagattatcttcgatataagtgttatagacaccgcgcgccagcgccgcttcatcaccaccaccggtccatacacgctgcccttttttaccaacaataatcgcggtgccggtatcctgacaggttggcagaacgcctttcgccgcgatgtcggagttacgcaggaattgcagcgccacatatttatcattttcgctggcctccgggtcacgcagaatgtcggccacctgttgttggtgcgccggacgcagcatgaacgacgcatcatgaaacgcctggcgcgccaacagagttaacgcttcgggtgcgactttcaaaatctcctgcccttcaaattcagatacgctaacgtgttcgctggttagcaggtaatactcagtatcatcttttttgagtggaaaaggagcctgataatgaaagggtttgtttgacattgttctctcacttactgcctggtttggttatgctctgggcgggtgttccgttgccctgttaaaagcgagtaacaatatcctacacacttttttaacaaaaactgagactagtacgactttttgcggctccaggttacttcccgtaggattcttgctttaatagtgggattaatttccacattaaaacagggattgatcatgcaaaaactcattaactcagtgcaaaactatgcctggggcagcaaaacggcgttgactgaactttatggtatggaaaatccgtccagccagccgatggccgagctgtggatgggcgcacatccgaaaagcagttcacgagtgcagaatgccgccggagatatcgtttcactgcgtgatgtgattgagagtgataaatcgactctgctcggagaggccgttgccaaacgctttggcgaactgcctttcctgttcaaagtattatgcgcagcacagccactctccattcaggttcatccaaacaaacacaattctgaaatcggttttgccaaagaaaatgccgcaggtatcccgatggatgccgccgagcgtaactataaagatcctaaccacaagccggagctggtttttgcgctgacgcctttccttgcgatgaacgcgtttcgtgaattttccgagattgtctccctactccagccggtcgcaggtgcacatccggcgattgctcactttttacaacagcctgatgccgaacgtttaagcgaactgttcgccagcctgttgaatatgcagggtgaagaaaaatcccgcgcgctggcgattttaaaatcggccctcgatagccagcagggtgaaccgtggcaaacgattcgtttaatttctgaattttacccggaagacagcggtctgttctccccgctattgctgaatgtggtgaaattgaaccctggcgaagcgatgttcctgttcgctgaaacaccgcacgcttacctgcaaggcgtggcgctggaagtgatggcaaactccgataacgtgctgcgtgcgggtctgacgcctaaatacattgatattccggaactggttgccaatgtgaaattcgaagccaaaccggctaaccagttgttgacccagccggtgaaacaaggtgcagaactggacttcccgattccagtggatgattttgccttctcgctgcatgaccttagtgataaagaaaccaccattagccagcagagtgccgccattttgttctgcgtcgaaggcgatgcaacgttgtggaaaggttctcagcagttacagcttaaaccgggtgaatcagcgtttattgccgccaacgaatcaccggtgactgtcaaaggccacggccgtttagcgcgtgtttacaacaagctgtaagagcttactgaaaaaattaacatctcttgctaagcttattaaaggcttataacaccttcaggcggccagtccgcctgatttcattttatggataatcattatgaataaatcgctggtagcggtaggcgtcattgttgcgctaggcgtagtctggacaggcggcgcatggtatacaggcaagaagattgaaacccatctcgaagacatggtcgcgcaggcgaacgcgcaactcaaactgacagctcctgaatccaacctggaagtgagttatcaaaactatcatcgcggcgtattcagcagccagttgcaactgttggtgaaacccattgccgggaaagaaaatccgtggattaaaagcggtcagagcgtcatcttcaacgaatcggttgatcatggtcccttcccgcttgcccagcttaaaaaactgaacctgatcccgtcgatggcatcaattcaaaccacgctggttaataacgaagtaagcaaaccactgtttgatatggcaaaaggtgaaacgccttttgagattaactcgcgcattggttacagcggtgattccagttccgatatttcgctcaagccactgaattacgagcaaaaggatgaaaaagtcgcctttagcggcggcgagttccagttaaatgctgacagagacggcaaagccatctccctttccggggaggcgcaaagtggtcggatagacgcagttaacgaatacaaccagaaagtgcagttgacctttaataatctgaaaaccgacggttccagcacgctggcaagttttggtgagcgtgtaggaaatcaaaaactgtcactggaaaaaatgaccatttcagtggaaggcaaagaactggcactgctggaaggcatggagatcagcggtaaatcggatctggtcaatgacggtaaaacgatcaatagccaactggattactcgctaaacagcctgaaggtacagaatcaggatctgggcagcggcaagctgactttaaaagtcggccagattgatggtgaagcctggcatcagtttagccagcaatataacgcgcaaactcaggcgctgctggcacagccagaaattgccaacaaccccgaactttatcaggagaaagtgacggaagccttctttagcgccctgccgctgatgctgaaaggcgatccggtgattactatcgcgccgctaagctggaaaaacagtcagggtgaaagtgccctgaatctgtcgctgttcctgaaagatccggcaacgactaaagaagcgccgcaaacgctggcgcaggaagtagatcgttcggttaaatctctggatgcgaaactgaccattccggtggatatggcaactgagtttatgactcaggtagcgaagctggaaggttatcaggaagatcaagcgaaaaaactggcgaaacagcaagttgaaggtgcatcagcaatggggcagatgttccgtctgaccaccttgcaggacaataccatcaccaccagcctgcaatatgctaacggtcagataacgttaaatgggcagaaaatgtcgttagaagattttgttggcatgtttgcgatgccagctcttaacgttccggctgtaccggcaattccgcagcagtaattcacggccaaaacgccggagaattttcactccggcgttttcatctgaaaacaaaccagagattgcctgatgcgctacgcttatcaggcctaccttttcctgcaacactttgaatttatgagtttttgtaggctggataaggcgtttacgccgcatccggcataaaaaacgcgcactttgtcaacaatctgaaacgccggagatttttctctccggcgttattttttacttcagcataaagtcatactgaatactcattttcacatcccagtaattcaggcgatcgcccagcgtactgccatcgcgcttttcccgccctttatcggcagcaagaaagaaattcatcccttgtaacggcccttcgctgacccgatagttcataccacctaagatacccgtgccttcaatccgcacatctcgtttactggattcatagccgcgagtcacaatcggtgcaaatgtcagcgtaaattgcggcgttaaacgatagttgacgcccaattgccaggactgcattccttcacggttacgatcaagacttaatgaaaagggatagccaatgtcggtatccaccacggcaccattcattgcatggcgcaaataaccaccactgccaaatacacttccccacggcgcattccaggtcaattgtccactaaccaacgccgtttcattgggctggctggtattacgacttaaaccttcgagctgcgcgtaaaagccgagcaactcccctttcaacgtataattcgggtcgagcggtatgcttttctcgagaatactttgtatctgattggaaacatctttctgtaccgatgcccccagagaatagcgactggtatcatcatgccaactggcggctaaaaaagaacgtgcgcgatgtttatcgtattttcccgtctggctgttatacaccccttcatcacgaataccggttgttgaatcagtccataaaaatactcgtgaacgccacattccccacagatcaatatttggtgttaaagcccaataacctaatgctccttcagaaactgtcggtaatgtacgttgcgaactgccagccattaacggaatacgataaggtaagctaccataactataatccgtcccgaagcgacctaatttaagcaggctattttcactgggttttatttttactgcccccagggcaaagccaaaacttttatcaccatcaagataccaccgggtactcatatcagcacgagcacctaatttataaacataatacgccccgccttcaacgccaataatattggaataataaccactattgaaatcgagcaatcctccctgtacccatgcgtaaatatctcttcccgcgccagcactgggcttatccgccctgcgcaattcgtttttcagtctgatgcgtagtcccgcttcatcgtcagccagttgcgccgcataagcagaggtaaggccagaggcagccgtcaggcaaataacggccatggccactatttttctcatagttgcacctttgatgttctgattatttttattgaatattaattagtgatatcgctgattaattgctgctgcacttttttacgattatcaatttcaaccacgatttctttgaattttttatccgtgagcggataaaaccagataataacgaatgccagtagcataaatccgcaaggtactaaggcaattgatgtgcggatgcccataataacttccggcgtttgcacctgattggcgatatatccgcttaaccccaaaataaaggcaggaattgaacctccgattgcctgaccgcatttacgggtaaatgagaatagtgaataggtgagcccttcaattcgcacgccggtcaggtattcaccgtattctacggtatcagcttccagcgcccacatcacggtcatggtaacgccctgaccaattgaagcgatggccaacgcaaccaacgccaccggcagtgaccagacggaaacccagaagaacagcagataaccgcaggttcccagcaaagcgccaatcaggaaggtattctttttaccgatcctcgcgaccatccccggcaccagcggtgccgatgccacagtaccaaccaggttttgcaccagtaccagcacagtgaacagcccggtatcatttaacacatagcgcacgtagaacaacgacgaggcgctgaccgcaaaggtcgaaatcagcacacacagcgcaccgatgcacaacataaacagcgggcgattccgtttcagggtttgcagactgatattcaatgacggctgcgcaacgatacgtaccacattctcacgcgtcgatttgaagcagatgaagtaaagcaccattccggcaatcgccagcacaattgtccagaaatggtataccgacaccatctcttccgggctggagttcttaatgctcggtcctatcagaaatgccaggcagacaaaggtcaatgaagcggcaatcccacgagccgcgcccagacgggcgcgggattgtggttgttgggtcatcgcggtagcaagtgaaccataaggaatattcaccaggctgtagcaaagcccgaggcccatgtaggtcaaatatgcatacaccactttgctaccatggctccagtcggtcagcacccagaataccagcacgctgaagatcattaacggcgcagtaccgaagagtaaaaacgggcggaattttccccagcgggtattcacactgtccaccactcgtccggcaaagacgtcggcgaaggcatcgaatacccgcaccagtaacagcatggtgcccgccgcagcggcaccgacgccagcgacgtcggtgtagtaactcaacaggaagagcgcccccattgcgaaggcgaagttattggcgacgtcaccgaggctgtagccgacgatggtgcgccaggagagttgttgattcattgtttgcctccctgctgcggtttttcaccgaagttcatgccagtccagcgtttttgcagcagaaaagccgccgacttcggtttgcggtcgcgagtgaagatccctttcttgttaccgccaacgcgcaatatgccttgcgaggtcgcaaaatcggcgaaattccatacctgttcaccgacgacggcgctgacgcgatcaaagacgcggtgatacatatccagccatgcacactgatactcttcactccacatgtcggtgtacattgagtgcagcccggctaacgtatccacgccgtattcggtgatgataatcggctgatgcagtttctcctgccaggccagaagttctttttccagtaccttctctgccgtttccaaatcgccgctttggacataccatccgtaataacggttcaggcacagcacatcaaagagatcgctgatggtatcggtgtgagcgtcgcagaacattacattgacgcaggtgatcggacgcgtcgggtcgagtttacgcgttgcttccgccagtggcgcgaaatattcccgtgcaccttgcggacgggtatccggttcgttggcaatactccacatcaccacgcttgggtggtttttgtcacgcgctatcagctctttaatcgcctgtaagtgcgcttgctgagtttccccgttgactgcctcttcgctgtacagttctttcggcttgttgcccgcttcgaaaccaatgcctaaagagaggttaaagccgacagcagcagtttcatcaatcaccacgatgccatgttcatctgcccagtcgagcatctcttcagcgtaagggtaatgcgaggtacggtaggagttggccccaatccagtccattaatgcgtggtcgtgcaccatcagcacgttatcgaatcctttgccacgcaagtccgcatcttcatgacgaccaaagccagtaaagtagaacggtttgtggttaatcaggaactgttcgcccttcactgccactgaccggatgccgacgcgaagcgggtagatatcacactctgtctggcttttggctgtgacgcacagttcatagagataaccttcacccggttgccagaggtgcggattcaccacttgcaaagtcccgctagtgccttgtccagttgcaaccacctgttgatccgcatcacgcagttcaacgctgacatcaccattggccaccacctgccagtcaacagacgcgtggttacagtcttgcgcgacatgcgtcaccacggtgatatcgtccacccaggtgttcggcgtggtgtagagcattacgctgcgatggatcccggcatagttaaagaaatcatggaagtaagactgctttttcttgccgttttcgtcggtaatcaccattcccggcgggatagtctgccagttcagttcgttgttcacacaaacggtgatacgtacacttttcccggcaataacatacggcgtgacatcggcttcaaatggcgtatagccgccctgatgctccatcacttcctgattattgacccacactttgccgtaatgagtgaccgcatcgaaacgcagcacgatacgctggcctgcccaacctttcggtataaagacttcgcgctgataccagacgttgcccgcataattacgaatatctgcatcggcgaactgatcgttaaaactgcctggcacagcaattgcccggctttcttgtaacgcgctttcccaccaacgctgatcaattccacagttttcgcgatccagactgaatgcccacaggccgtcgagttttttgatttcacgggttggggtttctacaggacgtaacataagggactcctcattaagataataatactggtcaacctttaatctgattagttaaccaattctgtgttgcacacagttatctgtgagaaacccatggaagagaaatggaaataaaaagaactgacaccgcgatcaaaaaaccaaaaactgcaatacccacagcgtgatatagatcgcattaatctttaaaacagcgttgacagaagccataaaataagcaaccgaacgttcgttcgagcgtattgggaacgataaactctcatgacatatggctacagtgaatattttggggggaattctccgaagccgggaaggataatttttgcacagagaaattacgatatgaaacgcgggcacagttatcaccagcccgccgaaaaagagagagaatcaggatgcggttaagataccgccaatcatcgcgcgtaatccctgagcaaacgacgcttcacgcgccaggtcttccgcttcgatatcggccagtacaccgtaggtcagatccagcagtaaacgtgaagtcattgccgtgttgatgtctgggcttatctcgcctttttgctgggcatcacgcatccgctgggcaacaaattccgtgatcgtcatatgcttatttttaagcatggcggcgacctgtgggttacgcatcccttccgccataatttcaaccaccagcgcccgttgtccaaaggcttcatgggtgagagagacaatggactcgaccatatagtcaacgaaatgaatcccttcaatcggttcccggaaacgggccagcgccctctcctggtcctgtaagataatcgcctgaatcaaggcttctttggagatgaaatggtgatagagcgtcccgggactaatggcgcaagatttacagatggctttcatcgaggcactgtgaaatccattttctgaaaaaatctctctggcagcattgaggatccgggtccgtgtcggttgtgcttcagtctgcatgttatccatcattaaaccattatagttagcgtgaataactagtttaccgcgttgtcaggtgagcgcctatcattgctgttgaatagtgcgaaggcacactctattcgtatacttttcactctgaaattggttaaccaatagccgtgatttggctgccagttatttagcagagacgttgatgagtttatcccggtaaacaacacgcacggttgtttaccggtccgttagtgtattaattgagctcctgtaccccaccaccggagacggtgagaatttgtccgcttacccagctcgcagcaggcgagcaaaggaacagcgctgcgttagcaatatcttgcggttggcccagacgtctgatcggcgtgtgctgtaacattttttgttcaatttctggtgtaataacggatttcagggcatcggttaatattgcccccggcgcaatgccatttacccgaatatttttttcacccaggtcaaacgccatatttctgaccagatgactggccgcagctttagatgatgcataggaagtcatgtttatatttttattttctgccgccatagaagtgatggtcagaataacgccaccgccatttttttccatttctggcgcaacaagttgtgacagatggaaaaaagaaaacacattcagttcataagcacggcgaaaatccgccattggcatatcaaacggtttaggtccaccgccaccggcgttgttaaccagaatatcaactttacccagcttactgatagcaaagtctgccagtgcagagagttcctgttcggaagtaatatcacaacggcaggcaaatgcctgaccacccagttgttgaatttcgtctacaacatggttagctgcgtcggcgttaatatcactgaccaccacagatgcgccagctgtcgcgaatgtaatggcgatttctttaccaatacctgcacccgcacctgtgatgatggcgcattttccgtcgagtctcaggttgtcagaattaaacacataaacctcctgtgaacttcagtaaaaataaaaggcaccgcctgtgtgccacattttttatcattaaccttgaggaaaggacactaccaggtatagcagataaagagaggattatttcgctgcaatgagccgggcgggaataataagattgcgtgaatgcgtctcttcatgggtgattttttgcatcatgcgatccgcaagtgtgataccaagttcccgcgctggcgtgctggcccaggtaacaggtatatcatcaagtgtggttggtgtcgcatcggtaaatgccgccagcgaaacctgttgctcaaagtaacgatcgactccgctttccccgctttgccgccctgctttgagcaaaccaaaccatgcccccatcgcaatagtttcgttatagcaaaccacggcactgatggtcgggttatgacgtaaaagcgccgtgatagcttccgcggcttgcttctggctggaagtgcactccaacacccaatcgctatgaaacggcaggccaaattttagtagagttgcacaatagcccccaacccgttctgcacgggttaatgaggaactttgccctcccagccaggcgatccgctgatgcccattgcgaatgagatgctccgtcaacaactgtgcagcctgcatgttgtccgggcgaaccgtatcaacatcatcaagataactggcacgggaagcgaaaatcaccgggatagctttttcttctgccatccgtcgcaggtcatcgctacttcctgcagctccggcaattaccacaccatcgacaccctgattcagtaacagtgaaaaccgctgtgccagctgctcaccgtctttaccgccgtgaagcaaaaaaaccatccgtccctgcgcttccagagcttccgtcaatccggccgtcaattcggcgtaaaacggcgcagataaatcacggacgatcaaaccaatgacgccgctttgcccgccgcgcagcgccgacgcctggcgattgcgcacaaatcccagctcttcaatggcggcgttaacgcgttctcctgtggcggtagagattcgccctttgccactaagcaccagcgaaacggtacttaccgacacgcccgcagccagcgcaacatcatgaatggttatttttttggcggtagccatgcagatgacctactccctgattatgtgacagataaaacgttttaccttttatttatcttatacccgctattatcgttgcgtaatgtgatttatgcctcactaaaatttgataaaacgttttatcttctcgcgcaatttactgaatccagattgttctctacgaggagtcgttttatgacggcgaaaacagcaccgaaagtcacgctgtgggagttcttccagcagttaggcaaaaccttcatgttacccgtggcattattgtcgttctgcggcattatgctcggcattggtagttctcttagcagccatgatgtcataaccctgatcccggtcctgggcaaccccgtgttgcaggctatctttacctggatgagtaagattggctcgtttgcttttagtttcctgcctgtcatgttctgtatcgccatcccgctgggcctggcacgcgaaaataaaggcgtagcggcattcgctggcttcatcggttatgcggtaatgaacctcgcggtaaacttctggttgaccaataaaggcattctgccaaccacggatgccgcggttctgaaagccaataacatccagagcattcttgggatccagtcgatcgataccgggatcctcggtgcggtgatcgccggtattatcgtctggatgctgcatgagcgtttccataatatccgcctgccggatgcgctggcattcttcggcggtacgcgcttcgtaccaattatctcctcgctggtgatgggccttgtcggcctggtgattccattagtctggccgattttcgccatgggtattagcggcttgggccatatgataaacagcgcgggtgatttcggaccgatgctgtttggtaccggtgaacgtctgctgttgccgtttggtctgcatcacattctggtggcattaattcgctttaccgacgcaggcggcacgcaggaagtctgcggtcaaaccgtcagcggcgcactgaccatcttccaggcgcaattgagttgcccgaccactcacggtttttctgaaagcgccacgcgtttcctttcgcaaggtaaaatgcctgcgtttctcggcggtctgccaggtgcagcgttagctatgtatcactgcgcgcgcccggaaaatcgccataaaattaaaggtctgctgatttctggcctgatcgcctgcgtcgttggcggcactaccgaaccgctggaattcctgttcctgttcgtagcgccagttctgtatgtcatccacgcgctgttaaccggcctcggcttcaccgtcatgtctgtgctcggcgtcaccatcggtaataccgacggcaatatcatcgacttcgtggtgttcggtattttgcatggtctgtcaaccaagtggtacatggtgccagtggtggcggcaatctggtttgtcgtttactacgtcatcttccgtttcgctatcacccgcttcaatctgaaaaccccggggcgcgatagcgaagttgccagctcaatcgaaaaagccgttgccggtgcgccgggtaaatcaggttacaacgttcctgcaatcctcgaagcattaggcggtgccgacaatattgtcagcctcgataactgcattacccgtctgcgtttgtctgtgaaagatatgtcgcttgttaatgtgcaggcactgaaggacaatcgggcaattggcgtagtacaacttaatcaacataacctgcaggttgttatcgggccacaagttcagtcagtaaaagatgaaatggccggtctgatgcatactgtccaggcataaggataagatatgttcgatttttcaaaggtcgtggatcgtcatggcacatggtgtacacagtgggattatgtcgctgaccgtttcggcactgctgacctgttaccgttcacgatttcagacatggattttgccactgccccctgcattatcgaggcgctgaatcagcgcctgatgcacggcgtatttggctacagccgctggaaaaacgatgagtttctcgcggctattgcccactggttttccacccagcattacaccgccatcgattctcagacggtggtgtatggcccttctgtcatctatatggtttcagaactgattcgtcagtggtctgaaacaggtgaaggcgtggtgatccacacacccgcctatgacgcattttacaaggccattgaaggtaaccagcgcacagtaatgcccgttgctttagagaagcaggctgatggttggttttgcgatatgggcaagttggaagccgtgttggcgaaaccagaatgtaaaattatgctcctgtgtagcccacagaatcctaccgggaaagtgtggacgtgcgatgagctggagatcatggctgacctgtgcgagcgtcatggtgtgcgggttatttccgatgaaatccatatggatatggtttggggcgagcagccgcatattccctggagtaatgtggctcgcggagactgggcgttgctaacgtcgggctcgaaaagtttcaatattcccgccctgaccggtgcttacgggattatagaaaatagcagtagccgcgatgcctatttatcggcactgaaaggccgtgatgggctttcttccccttcggtactggcgttaactgcccatatcgccgcctatcagcaaggcgcgccgtggctggatgccttacgcatctatctgaaagataacctgacgtatatcgcagataaaatgaacgccgcgtttcctgaactcaactggcagatcccacaatccacttatctggcatggcttgatttacgtccgttgaatattgacgacaacgcgttgcaaaaagcacttatcgaacaagaaaaagtcgcgatcatgccggggtatacctacggtgaagaaggtcgtggttttgtccgtctcaatgccggctgcccacgttcgaaactggaaaaaggtgtggctggattaattaacgccatccgcgctgttcgttaaccccaattgcgcaacgtaaaaaatcgttgcgcaatcgtggatttttaccctgctttgtttttataatggtgcgcacttttatatccagaaaaagagtgcgaccatgattgataccaccctgccattaactgatatccatcgccaccttgatggcaacattcgtccccagaccattcttgaacttggccgccagtataatatctcgcttcctgcacaatccctggaaacactgattccccacgttcaggtcattgccaacgaacccgatctggtgagctttctgaccaaacttgactggggcgttaaagttctcgcctctcttgatgcctgtcgccgcgtggcatttgaaaacattgaagatgcagcccgtcacggcctgcactatgtcgagctgcgtttttcaccaggctacatggcaatggcacatcagctgcctgtagcgggtgttgtcgaagcggtgatcgatggcgtacgtgaaggttgccgcacctttggtgtgcaggcgaagcttatcggcattatgagccggaccttcggcgaagccgcctgtcagcaagagctggaggcctttttagcccaccgtgaccagattaccgcacttgatttagccggtgatgaacttggtttcccgggaagtctgttcctttctcacttcaaccgcgcgcgtgatgcgggctggcatattaccgtccatgcaggcgaagctgccgggccggaaagcatctggcaggcgattcgtgaactgggtgcggagcgtattggacatggcgtaaaagccattgaagatcgggcgctgatggattttctcgccgagcaacaaattggtattgaatcctgtctgacctccaatattcagaccagcaccgtagcagagctggctgcacatccgctgaaaacgttccttgagcatggcattcgtgccagcattaacactgacgatcccggcgtacagggagtggatatcattcacgaatataccgttgccgcgccagctgctgggttatcccgcgagcaaatccgccaggcacagattaatggtctggaaatggctttcctcagcgctgaggaaaaacgcgcactgcgagaaaaagtcgccgcgaagtaacaaaatggatggtgcaaatgcaccatccatttttcatgcaaggcacaaagtcgcgcgatgtttggcggattcgatgcccagctcaatcaactccattacctggattgcctggcttgccggaaccggattttcaccatcgccatttaacgcatcacgaatagccgcatagtaagccggataattcccaggcaccgtcaacagcgtttcttcgacacgttcctcaccttccacgcgggtaagtacgccatcacgcatatcgtagccccagtcttcctgcggtagacgctcgccatttttcagacgttcttcctgtggatcgaggccatatttcacataactgcctcgggatccatgcacgatataccgtgctgactcagcggctgccagcatggtaccgtgtaaaatgactcgccgctgtggataggacaagatggcgtggaaataatcggtcgactgcgctccgggccgtaactgtgccaaatctaccgtcatgctgaccggtaaaccaaaaagcgtaatggcctgatcaagaagatgtggtgctaaatcgtaccagataccgctgcctgggccgccctgttcacgccaacgatcgcgcacctgcggacggaagcggtcaaaatgagactcaaagtaagcaacttcacccagcacgccttccgcgagtaaaccttttagcgtcaagaaatcgctatcccagcgacggttatggaatacagacagcacacgccccaggctttttgccagcgcatccagctctcgcgcttgtgacagtgtcacggtaaagggtttatcaacgaccacatgtttacccgcctcaagcgccgctttggctaacgggaaatgggtatcgttgggtgtaggaatgacaatcaggtctatgttgggatcgttaaacagatgcttcggctcagagacaaccgtaaccgttggccagtcggcttttacttttgtttcatcactgctggagattaccgccagttcctgcccgggcgtgcccgcaatcaggggcgcatggaaggttttgctcgcataaccatacccaatcaacccaacacggatgttgtcgctcatgtcattgcctctcattgaagtatgatggctatttgacactaaaccaggaatttattatcttgttcgatgttgttggtgattgtcagggatagtaaagcgcgttactcttttcagagcagtttttcatccctgaatatttgccatcagcgcattcttattattgtaataacacaagcgttcacttttggtgaaattttatcatcactaataatacctacccctttggtattaattattttatggaccttttatgactgttcaggactacttattaaaatttcgcaaaatcagttcactcgaaagtctggaaaaactctacgaccatcttaattacaccctgacggacgatcaggaactgatcaatatgtatcgtgctgccgatcaccgtcgcgcagagctggtttctggcgggcgtttgtttgacctcggccaggtaccgaagtccgtctggcactatgtccaataaagaaagtagcgatcggttataaaagccttataataacgcccctaaaattagatttgcctgtttgcgtcgctattctggagaacctatgaccaccacaacgccacaacgtattggaggctggttgcttggcccgttggcctggcttttagtcgctctgttgagtacgacgctggcgttgttgctgtataccgctgcgttatcttctccgcaaacatttcaaacgctcggcggacaagcactgacgacacaaatcttatggggcgtttcttttattaccgctatcgccttgtggtattacacactgtggttgaccatcgctttctttaaacgtcggcgttgtgttcctaaacactatattatctggctgcttatttccgtattgctggcagtaaaagcattcgctttttcacccgtggaagatggcatagccgttcgccagttgctgtttactttgttggcaaccgcattgatcgtcccctatttcaaacgctcgtcgcgggtaaaagcgacgtttgtgaatccgtaataaccttacagttaacctgttgtcgcctgctctggattaacggataataggcggcttttttatttcaggccgaaaaatgactgactacctgttactgtttgtcggaactgtactggtcaataactttgtactggtcaagtttctcggtctctgtccgtttatgggggtttccaaaaaactggaaaccgcgatgggcatggggctggcaacaacgtttgtgatgacgctggcgtctatttgcgcctggcttatcgatacgtggattttgatcccacttaatctgatttacctgcgcaccctggcatttattctggtgattgctgtggtcgtgcagttcaccgagatggtggtgcgcaaaaccagcccggtgctttaccgtctgctggggatttttttgccgcttatcaccaccaactgtgcagtgctcggcgtggcgttgctgaatatcaatctcgggcacaatttcttgcagtcggcgctgtacggtttttccgccgctgtcggtttctcgctggtgatggtgctcttcgccgccatccgcgaacgccttgctgtggctgatgtcccggcaccttttcgcggtaatgccattgcgttaattaccgcaggtcttatgtctctggcctttatgggctttagtggtttggtgaagttgtaatgaatgctatctggattgccgttgccgccgtgagcctgctgggcctggcgtttggcgccattctgggttatgcctcccgccgttttgcggtggaagacgatccggtcgttgagaaaattgacgaaatcttaccgcagagccagtgtggtcagtgcggttatcccggctgtcgcccctacgcggaagccatcagctgtaacggtgaaaaaatcaaccgttgcgccccaggtggcgaagctgtgatgctaaaaattgccgagttgcttaatgtcgagccgcagccgctggatggcgaagcgcaagagataacgcctgcgcggatggtggcggttattgatgaaaataactgtattggctgcactaaatgtattcaggcgtgtccggtagacgccatcgttggcgctacccgtgccatgcatacggtaatgagtgatctctgtacgggctgcaatttatgtgttgatccgtgcccgacgcactgcatctcgttgcaaccggtcgcagaaacacctgactcctggaaatgggatctgaacaccattcccgtgcgtatcattcccgtggaacaccatgcttaagttattctctgcattcagaaaaaataaaatctgggatttcaacggcggcatccatccaccggagatgaaaacccagtccaacggtacacccctgcgccaggtacccctggcgcagcgttttgttattccactgaaacagcatattggcgctgaaggtgagttgtgcgttagcgtcggcgataaagtattgcgcggccagccgcttacccgtggtcgcggcaaaatgctgcctgttcacgcgcccacctcgggtaccgttacggctattgcgccccactctacggctcatccttcagctttagctgaattaagcgtgattattgatgccgatggtgaagactgctggatcccgcgcgacggctgggccgattatcgcactcgcagtcgcgaagagttaatcgagcgcatacatcagtttggtgttgccgggctgggcggtgcaggattcccgacaggcgttaaattgcagggtggcggagataagattgaaacgttgattatcaacgcggctgagtgcgagccgtacattaccgccgatgaccgtttgatgcaggattgcgcggctcaggtcgtagagggtattcgcattcttgcgcatattctgcagccacgcgaaattcttatcggcattgaagataacaaaccgcaggcgatttccatgctgcgcgcggtgctggcggactctaacgatatttctctgcgggtgattccaaccaaatatccttctggcggtgctaaacaattaacctacattctgaccgggaagcaggttccacatggcgggcgttcatccgatatcggcgtattaatgcaaaacgtcggcactgcttatgcagtgaaacgtgccgttattgatggcgagccgattaccgagcgtgttgtaaccctgactggcgaagcaatcgctcgcccgggcaacgtctgggcacggctggggacgccagtgcgtcatttattgaatgatgccggattctgcccctctgccgatcaaatggtgattatgggtggcccgctaatgggctttaccttgccatggctggatgtcccggtcgtaaagattaccaactgtctgttggctccctctgccaatgaacttggcgaaccacaggaagaacaaagctgcatccggtgtagcgcctgtgctgacgcctgccctgcggatcttttgccgcaacagttgtactggttcagcaaaggtcagcaacacgataaagctaccacgcataacattgctgattgcattgaatgtggggcttgcgcgtgggtttgcccgagcaatattcccctggtgcaatatttccgtcaggaaaaagctgaaattgcggctattcgtcaggaagaaaagcgcgccgcagaagccaaagcgcgtttcgaagcgcgccaggctcgtctggagcgcgaaaaagcggctcgccttgaacgacataagagcgcagccgttcaacctgcagccaaagataaagatgcgattgctgccgctctggcgcgggtgaaagagaaacaggcccaggctacacagcctattgtgattaaagcgggcgaacgcccggataacagtgcaattattgcagcacgggaagcccgtaaagcgcaagccagagcgaaacaggcagaactgcagcaaactaacgacgcagcaaccgttgctgatccacgtaaaactgccgttgaagcagctatcgcccgcgccaaagcgcgcaagctggaacagcaacaggctaatgcggaaccagaacaacaggtcgatccgcgcaaagccgccgtcgaagccgctattgcccgtgccaaagcgcgcaagctggaacagcaacaggctaatgcggaaccagaagaacaggtcgatccgcgcaaagccgccgtcgaagccgctattgcccgtgccaaagcacgcaagctggaacagcaacaggctaatgccgagccagaacaacaggtcgatccgcgcaaagccgccgtcgaagccgctattgcccgagccaaagcgcgcaaacgggaacagcaaccggctaatgcggagccagaagaacaggttgatccgcgcaaagctgccgtcgaagcggctattgcacgcgccaaagcacgcaagctggaacagcaacaggctaatgcggtaccagaagaacaggttgatccgcgcaaagcggcagttgccgcggctattgcccgcgctcaggccaaaaaagccgcccagcagaaggttgtaaacgaggactaaatggtattcagaatagctagctccccttatacccataaccagcgccagacatcgcgcattatgctgttggtgttgctcgcagccgtgccaggaatcgcagcgcaactgtggttttttggttggggtactctcgttcagatcctgttggcatcggttagtgctctgttagccgaagctctcgtactcaaactacgcaagcagtcggtagccgcaacgttgaaagataactcagcattgctgacaggcttattgctggcggtaagtattccccccctcgcgccatggtggatggtcgtgctgggtacggtgtttgcggtgatcatcgctaaacagttgtatggcggtctgggacaaaacccgtttaatccggcaatgattggttatgtggtcttactgatctccttccccgtgcagatgaccagctggttaccgccacatgaaattgcggtcaacatccctggttttatcgacgccatccaggttatttttagcggtcataccgccagtggtggtgatatgaacacactacgcttaggtattgatggcattagtcaggcgacaccgctggatacatttaaaacctctgtccgtgccggtcattcggttgaacagattatgcaatatccgatctacagcggtattctggcgggcgctggttggcaatgggtaaatctcgcctggctggctggcggcgtatggttgctatggcagaaagcgattcgctggcatattcccctcagcttcttagtaacgctggcgttatgcgcaatgttgggctggttgttctcaccagaaacactggcagcaccgcaaattcatctgctgtctggagcgaccatgctcggcgcattctttattttgactgacccggttaccgcttctacgaccaatcgtggtcgtcttattttcggcgcgcttgcgggcttattagtctggttgatccgcagtttcggcggctatcctgacggcgtggcttttgccgtcctgctggcgaacatcacggttcctctgatcgattactacacgcgtccgcgcgtctacggccatcgcaaagggtaaaccatgctgaaaactatccgaaaacacggcattacgttggcgctatttgcagcgggttcaacagggttaactgcggccatcaaccagatgaccaaaacgacgattgctgaacaggccagtctgcaacaaaaggcgttatttgatcaggtgctgccagccgaacgctataacaatgcgctggcacagagttgctatctggtaactgcgccagagttaggtaaaggtgagcatcgggtttacatcgccaaacaggatgacaaaccggtagccgccgttctggaagcaaccgcgccagatggctattccggtgcgattcagctgctggtgggagccgattttaacggcacggtacttggcacgcgcgtgacagagcaccacgaaacgccagggcttggcgataaaatcgaactgcgcctttctgactggatcacccattttgcgggtaaaaaaatcagtggtgcagatgatgcgcactgggcggtgaagaaagatggtggtgatttcgaccagttcaccggcgcgacgattactccccgcgcggtggttaatgcggtaaaacgcgccggattgtacgctcagacgttaccggcacaactttctcaacttcctgcctgtggagaataaagcgtgagcgaaattaaagacgttattgttcaggggttgtggaaaaacaactctgcgctggtccagttgctcggcctttgtcctctgttggcggtcacgtccactgccactaacgctctgggtttaggacttgcgactacgctggtactgacgctgaccaacctgaccatttcgacgctgcgtcactggacgccagccgagatccgcattcccatttacgtgatgatcatcgcctcggtggtcagcgctgtacagatgctgatcaacgcctacgcctttggcctgtatcaatcattagggatttttattccgctgattgtcactaactgtatcgttgtgggccgcgctgaagccttcgccgccaaaaaaggtccggcgctttcggcactggacggcttttcaattggtatgggcgcaacctgcgccatgttcgtgctgggttcactacgcgaaattatcggcaatggcacattgtttgacggtgcagatgcgctgttaggtagctgggcaaaagtattacgcgtggagattttccacaccgactcccctttcctgctggcgatgctgccaccaggtgcatttattggcctgggactgatgctggcaggaaaatacctgattgatgaaagaatgaaaaagcgccgtgctgaagcagctgcagaacgtgcattgccaaacggtgaaacagggaatgtctgatgaataaagcaaaacgcctggagatcctcactcgcctgcgtgagaacaatcctcatcccaccaccgagcttaatttcagttcgccttttgaattgctgattgccgtactgctttccgctcaggcgaccgatgtcagtgttaataaggcgacggcgaaactctacccggtggcgaatacgcctgcagcgatgcttgaactgggcgttgaaggggtgaaaacctatatcaaaacgattgggctttataacagcaaagcagaaaatatcatcaaaacctgccgtatcttgctggagcagcataatggcgaggttccggaagatcgtgctgcgcttgaagccctgcccggcgtaggtcgtaaaacagccaacgtcgtattaaacactgcattcggctggccgactattgctgtcgacacgcacattttccgcgtttgtaatcgtactcaatttgcgccggggaaaaacgtcgaacaggtagaagaaaagctactgaaagtggttccagcagagtttaaagtcgactgccaccattggttgatcctgcacgggcgttatacctgcattgcccgcaagccccgctgtggctcttgtattattgaagatctttgtgaatacaaagagaaagttgacatctgaagaaaaggggtaacaccgattaccccattgataacctttctttatcctcttttaaaacatctttttaacgtcaatgatgccattgcttagcgttatcatcaggtaatccgtttgcggataaccaaaaatgcaggttaattgtttttttaatagcgaaattttctattcattcgtgatcaagatcacgatgctgtcgcaatgtaaaaacattgcaagaatcaggttaaaatcatttaaatttacacacgcaacaaatattgacctacaaaacattacactggctatttttcagaaactggactatctcactagtaaaaacgctaaatagcagaacatatcgccgttaagccatcacccccctctcagtgcagtgaaaaaatctgccgttacgttttttgaaaaatttaacgctggataacatttcccggaatggttgaattccccgcctcagttatatgtaacagattattacaaaggacttgtctgaaagtgcaagatagtgaacattacctgccgtttcccctcccactataacaattgcgcgtatgttttttatacataacgcgagaaagcacccccgttaatatgggatgtaaaaaaagaggtaaaagtgtccactgcaaaccaaaaaccaactgaaagcgtcagtttgaacgctttcaaacaaccgaaggcgttctatctcatcttctcgattgagttatgggaacgttttggttattacggcctacaaggaattatggctgtttacctggttaaacaactgggtatgtctgaagcggattcaatcacccttttctcttcctttagtgccctggtttatggtctggtcgctatcggcggctggttaggtgacaaggtactgggtactaaacgcgtaattatgctcggcgctattgtgctggcgattggttatgctctggttgcctggtctggtcacgacgccggtatcgtttatatgggtatggcggctattgcggtcggtaacggcctgtttaaagctaacccgtcttctctgctttctacatgctatgagaaaaacgacccgcgtctggacggtgcattcaccatgtactacatgtccgtcaacatcggctctttcttctctatgattgctacgccgtggctggccgcgaaatacggctggagtgttgcgtttgcgttgagcgttgtaggcctgctgatcactatcgttaacttcgccttctgccaacgctgggttaaacagtacggttcaaaaccagacttcgagcctatcaactaccgtaacctgctgctgaccattattggtgttgtggcactgatcgctatcgccacctggctgctgcacaatcaggaagttgcgcgtatggcgctgggcgttgttgccttcggtatcgtggttatcttcggtaaagaagccttcgcgatgaaaggtgctgcgcgtcgtaaaatgatcgttgccttcatcctgatgctcgaagccattatcttcttcgtgctgtacagccagatgccaacgtcactgaacttctttgcgattcgtaacgttgagcactccattctgggtctggccgtagaacctgagcagtatcaggcactgaacccgttctggatcatcatcggtagtccgattctggccgctatctataacaagatgggcgataccctgccgatgccaaccaagtttgcaatcggcatggtgatgtgttctggtgcgttcctgattctgccgctgggtgcgaaattcgcgtctgacgctggtatcgtgtctgtaagctggctggtcgcaagctatggcctgcagagcatcggggaactgatgatctctggtctgggtctggcaatggttgctcaactcgttccgcagcgtctgatgggcttcattatgggtagctggttcctgaccactgccggtgcaaacctgattggtggttatgttgcgggtatgatggctgtgccggataacgttaccgatccgctgatgtcactggaagtctatggtcgcgtattcttgcagattggtgtcgctactgccgttattgcagtactgatgctgctgaccgcgccgaaactgcaccgcatgacgcaggatgacgctgcagacaaagcggcgaaagcagccgtagcgtaaaattcagggaaactcttttacaagccgctaacttttcgttagcggctttttttttgttcagcaacgcactaccatactttaaaccacagacaaaaggagttaccgatgaaattgttctacaaaccgggtgcctgctctctcgcttcccatatcaccctgcgtgagagcggaaaggattttaccctcgtcagtgtggatttaatgaaaaaacgtctcgaaaacggtgacgattactttgccgttaaccctaaggggcaggtgcctgcattgctgctggatgacggtactttgctgacggaaggcgtagcgattatgcagtatcttgccgacagcgtccccgaccgccagttgctggcaccggtaaacagtatttcccgctataaaaccatcgaatggctgaattacatcgccaccgagctgcataaaggtttcacacctctgtttcgccctgatacaccggaagagtacaaaccgacagttcgcgcgcagctggagaagaagctgcaatatgtgaacgaggcactgaaggatgagcactggatctgcgggcaaagatttacaattgctgatgcctatctgtttacggttctgcgctgggcatacgcggtgaaactgaatctggaagggttagagcacattgcagcatttatgcaacgtatggctgaacgtccggaagtacaagacgcgctgtcagcggaaggcttaaagtaatagccatcggcccacaggtcgttgtgggccgaaatgagatatttcagagctttgttgcgctgaagtaatgttctggtttggcaatacgatcctgagcagccaccacttgcagctcatattcctgcattgctttggtggtcaccatgatttcgtagactgcagcggtcacatgttccagcgcctcctgcagcgttgccccctgaagcagtttcaccagcagtaaaccgctcgtcacatcaccaacacctaccggctggcgcataccaaaatccaccagcggacggctgatatgccaggcttcatcggcggtgaccagcagcatttcaaaacggtcacggctgtagccagctcgcgccaggtgtttaaccaacacaatttgtggcccttgcgcaatgagttcgcgcgctgccagaaccgcttcttcgacgttatttaccgcatgctcacagagtatttccagctcaaccagatttggcgcaatgatatcgctggcaggcaaaccgtgccgcacatgaaactctgcgacacccggtgcaacgatacagcctttttccggatgacccattaccggatcgcaaaaatatttcgcctgcggattcgcggctttcacctgacggacgataccgaggatatgttcaccctgctccgccgatcccagatagccacttaatacggcatcacaggtgtgtaatttatcaatggcggcaatgccttgcacaatttcggttaaatggctgggcggcatcacgcagccagtccatttgccgtattgggtgtgattagaaaattgaacggtgttcagcggccagacgttcgcgcccaggcggcgcatcggaaactctgccgcactgttacccgcatgaccataaacaacgtgagactggatagcgagaatatttttcatcatgttccctgtataaaaaccagggggagtgatttctcactccccctttccacttaatgcattatttccagcaaatcagacagtaattctttttaccgcgacgcagtaaggtaaaacgaccaaacagacgatcttcttctttaaagaagtattcaggatcggactgtttttcaccgttaatggtgatggcattggaggcgatagttttacgtgcctgaccacgggaaggttgcagttcagaatcgaccagtgcctgcatcaggtctgcgcccttttccatctcaaccatcggtacgccgtcctgcgccagctgttcgaagtccgcttcactcagcgcactcaaagaaccgctgaacaggcattcggtaatacgttttgccgcctgtaaaccttcttcaccgtgaaccagacgagtcacctgctccgccagtacatactgggcgcgcggtgctttaccgctgtttttatcttcttcttccagggcgttgatctcttcaatgctcataaaggtgaagaacttcaggaagcggtaaacgtcggcatccgcagtgttgatccagaactggtagaatttgtacgggctggttttcttcggatccaaccagactgcgccgccttcagttttaccaaatttggtgccatctgctttagtgatcagcggaacggtcaggccaaacacctgattctgatgcagacgacgggtcaggtcgataccagaagtgatgttaccccactggtcagaaccaccaatttgcagcaccacaccgtactgtttgttcagacaggcgaagtcataaccctgcaacaggttgtaggaaaactcagtgaacgaaatcccctgatcttcacggttgagacgctgcttaaccgcttctttgttgatcatctggttaacggagaagtgtttgccaatatcgcgcaggaaggtcagcacattcatattgccgaaccagtcatagttgttcgccgcgatagcagagttttctccacagtcgaaatcgaggaacggggcaacctgcttacggattttgtccacccactcctgaacagtttcttcggtgttcagcttacgctcggcagctttgaagctcgggtcgccaatcagacccgtcgcgccgcctaccagcgcaaccggcttgtggcccgcctgctggaagcgtttcaggcataacaatggaacaagatgccccaaatgcaagctgtcagcggtaggatcgaagccgcaatagagcgcgatcgggccttgcgccagtcgctctgctaacgcttcctcgtccgtcacctgggctaccagcccccgctcttgcaattgtttaatcaagttactgcttgccatcaaaatctccatgtatataacgactgcacctttgccggtacacgacttttcgccagatgcgaaagagacatagaataaagtgccagaatcaggagtaccagcgattaaagcaagatttttgcatcttttcagggtgcaagacgatcaatcttccacgcatcattttcacgctggtacaaaaagcggtcatgcaggcgatgctcaccaccctgccagaactcaatctgttcaaggctgacgcgaaaaccgccccaaaagctcggcaatggcacttcgccctgttgaaacttctgcttcagctccaggaatttactttcaaggataccgcgggcagaaatgcgactggactgcttcgaaacccatgcaccaatctggctatcacgcgggcggctatgaaaatatttcatcacttcgagagtcgaaagtcgttctgctttaccgatcaccatcacctggcgctcaagggtatgccacgggaacagcaggctaacgcgcggattattttcgatttgatgtgctttacggctgccgaggttggtgtaaaacaccatgcctttttcgtcgtaatgtttgagtaaaacgatgcgctgataaggctgaccatgttcatccacggtagcgaccaccatcgcggtagggtccgccagtttggcttcacaagcctgagagagccaacgttcaaaaagggttaatggatcggcgggaagatcgcggcggcgtaacccgcctttggtgtattcacggcgcagatgcgcgatttgctgcaattcgtcgttatcagacatggttttctttacggattgtcagtgggtgacgctattgtgcgccgcccctggaaaaatctcaacgctgtggattttgtaactgacagttattcaagacgatgcggtcgcgtttatagacagtcgcttcatcgcctttcgaccagaaaacatagattccgtcagtgtaacgcgcgccagaggctgaaatgccctgtttgagatgcagtagttgattatcgtaaacaaaactgacctcctggcgcggattattcagtttgaccgtcaacggtttttcatcacactggtattccagcgtatcggtttgcatgcgctcaaccagctgattaaaggcgctacagccggagagaaggaccggcaaaatgataattaacagttttttcatagtcatatcccgaagactttcctggtctggagggcaatacgccctccctaacgttccaagtgtaacggcagacgcggtaagaaaaattcagttaactctgatatcacgggttagcggggaaaatagcccccagtaccgtctcctggcttgcgccagtgacggaaggcagatttcctggtaatcccgccagcgtccgccaggcaagccaggcgaaagccaatgcttccatgtcatcgccactaatgccaacggcatcggtggtggtgacttctgtgcctggcagtaatgccgccagacgcgccatgagtagcggattacgactacctccaccacataccatcaatcgttcgcagccaccgctcaacaaaacttgttcagaaatggtcacggcggtgagttctgccagtgtcgcctgcacatctcggggatcaacacccggaaaatggcgcaaatggcgctccagccaaccatagttaaagtattcgcgtccggtgcttttcggtgcaggttgcgagaaatacgggtcgctgagcatattttgcagcagtgggagaataactttacccgcccgtgcccactcggcatctttatcgtaaggtttaccggcctgacgccagatccaggcatccatcagcatgttaccaggaccggtatcgtagcccccaaccggctgcccaggaatgagcagtgacagattggcgatgccgccaatattgagcaccattcgtcgctcggttgggtgagccagcagcgcatgatggaacgcaggtaccagcggtgcgccttgtcctcccaaggcaatatcgcgacggcgaaaatcaccgacaaccgtaattccggtgcgtgccacaatttgattgttatcgccaatctgtaaagtgtgtggtgccacgcccgtcggttcatgccagacggtttgaccgtgacaaccgatcgcaactatatctcttgcctgcagattttgttccttaagcaaggcattgaccgcatcagcaaaaagttgcccgagttgagtatcaagctgtccaaactgcgaaagtgtaagctgctggccctggcaaatatccagtacagcctgtttcagagataccgggatcggccaactcaaacttgccagctgtgcgacccggtgttcatcaattgtcgccaacacaacatcaacaccatcaaggctggtgcctgacataacgccaataaagcggcccgatttcatagttcatcctttttcaatctgacgtttgcgcaccactcaaacataaacttttcgtgaataccatgcggaatgaccgatttttaccgttggtagtaaaacattatcttcaaatcaataatcatcatgaatgttttgtttataattggttgatcctactttcattatgatttgctcatatttggtagaacatgtaaccatggattcacatatgccatatactttgaccatgagggatgcttgcgtggcgtttcatggtgaacaggagatttttcaatgattaaacgcgtattggttgtttcaatggtaggtctgtctcttgtcggttgtgttaataacgacaccctgtcaggggatgtttataccgcttctgaagcgaaacaagtacagaatgtcagctatggcaccatcgttaacgtacgtccggtacagattcagggcggtgatgattccaacgttatcggtgcaattggcggtgctgttcttggtggtttcctggggaatactgttggtggcggaaccgggcgttctctggctactgcagcaggcgctgttgcaggtggcgtagctggtcagggcgtacagagtgcaatgaacaaaacgcagggtgtcgagctggaaattcgtaaagacgatggtaataccatcatggtggtacagaaacaaggcaacactcgtttctctccgggccaacgtgtcgtactggccagcaatggcagtcaggtgaccgtttctccgcgctaaataagtttgcgtgtggtcaggttactgaccacacgcccccttcatttcaccctttggcctgtaactcaatgatattatgctcaagttttgcgatgagcgtaatcagttgctccagttcctctgcggagatgccatgtaatatttccgcgcgggttttgttaataacagcttccatttcgctgatcagcggctctgccttttccgtcagtttaatacgtttagcccgacgatcgctggcacaagtttgacgcgaaattaaccctttttcttccagttggtccagagtacggaccagtgatggctgctcgatgccaatcgcttttgccagttgaatttgcgactggtctggaggtaactgatggatattgtgtaacgtaacccaatgggtttgtgttaactccagcggtttcaggcgatggtctatcagagcacgccatatgcgcaccaaccgtgccagatcagaacctagtggcgattccaatttcatctccttataattagcttgctaagatattatgcggcttttagaatagtgtgcagcaattgtattgctaaaacaaatgtattgctgcatttggttaccgtcagacatatttttcagaaattgcgcgtaaatttttcgcacttaaagaatatttattaatctaacgcaatatattcggtcgtaaaggaatctactttgtgaagtttatgctcaatgcaacaggattgcccttacaagatctggtgttcggtgcgtccgtctactttcctccgtttttcaaagcattcgcgtttggattcgtcatctggtttgtcgtacaccgcctgcttcgtggctggatctacgccggtgacatctggcatcccttgttaatggatttatcgctgtttgcgatttgcgtttgccttgctctggcaatactgattgcgtggtaactatgtcaattaaaacaattaagtatttctcaacaatcattgtagcggtagttgcggttcttgccggatggtggctgtggaattattacatgcaatctccgtggacacgcgacgggaaaatacgcgcagaacaggtttctatcaccccacaggtgtcgggacgtattgttgagctgaatataaaagacaaccagctggttaacgcgggggatcttctgctcacgatcgataaaacgccctttcagatcgccgagctgaacgcacaggctcagctggcgaaagcgcaatctgacctcgcaaaagccaataacgaagcgaatcgtcgtcgtcatctctcacaaaattttatttctgccgaagaactcgataccgctaacctcaatgttaaagcgatgcaggccagtgttgatgccgcacaggcgacgctgaaacaggcacaatggcaactggcgcaaacggaaattcgcgccccggtgagtggatgggtgactaaccttactacccgcatcggcgattacgctgataccgggaaaccgctgtttgcccttgtcgacagccactcgttttacgtcattggttattttgaagaaaccaagttgcgccatatccgcgaaggtgcaccagcacaaattaccctctatagtgataacaaaacgttacagggtcacgtttccagtatcggtcgggcgatttatgatcagagcgttgaaagtgactcaagccttattccggatgttaaacctaacgtcccctgggttcgactcgcccaacgcgttcccgtccgctttgcgctggataaagtcccaggcgatgtcacgttggtgtcgggcaccacctgtagcattgccgtaggtcaataatgaacgcatcgtcatggtccttgcgcaatttgccctggttcagggccacgctggcgcaatggcgttatgcgttacgcaataccattgccatgtgtctggcgctgacggttgcctattatttaaatctggatgaaccctattgggcgatgacctcggctgcagtggttagctttcccaccgttggcggtgttatcagcaaaagcctcggacgcatcgctggcagtttgctcggagccattgcggcactgcttcttgccgggcatacgctcaatgagccgtggttttttctattgagcatgtcggcgtggcttggcttttgtacctgggcctgtgcgcacttcacgaataacgtcgcgtatgcatttcaactggcgggctacacggctgccatcatcgcctttccgatggttaatattactgaggccagccagctgtgggatatcgctcaggcgcgcgtttgcgaggtaatagtcggtattttgtgcggcggcatgatgatgatgatcctgccgagcagttccgatgctactgcccttttaaccgcattgaaaaacatgcacgcccgattactggaacatgccagtttactctggcagcctgaaacaaccgatgccattcgtgcagcacatgaaggggtgattgggcagatactgaccatgaatttgctgcgtatccaggctttctggagccactatcgttttcgccagcaaaacgcgcgccttaatgcgctgctccaccagcaattacgtatgaccagtgtcatctccagcctgcgacgtatgttgctcaactggccctcaccgccaggtgccacacgagaaattctcgaacagttgctgacggcgctcgccagttcgcaaacagatgtttacaccgtcgcacgtattatcgccccgctacgcccgaccaacgtcgccgactatcggcacgtcgccttctggcagcgactacgttatttttgccgcctttatctgcaaagtagtcaggaattacatcgtctgcaaagcggtgtagatgatcataccagactcccacggacatccggcctggctcgtcataccgataacgccgaagctatgtggagcgggctgcgtacattttgtacgttgatgatgattggcgcatggagtattgcttcgcaatgggatgccggtgccaatgcattaacgctggcagcaattagctgcgtactctactccgccgtcgcagcaccgtttaagtcgttgtcacttctgatgcgcacgctggtgttactttcgctattcagctttgtggtcaaatttggtctgatggtccagattagcgatctgtggcaatttttactgtttctctttccactgctggcgacaatgcagcttcttaaattgcagatgccaaaatttgccgcattgtgggggcaactgattgtttttatgggttcttttatcgctgtcactaatcccccggtgtatgattttgctgattttcttaacgataatctggcaaaaatcgttggcgtcgcgttggcgtggttagcgttcgccattctgcgtccaggatcggatgctcgtaaaagccgccgccatattcgcgcgctgcgccgggattttgtcgatcagctaagccgccatccaacactgagtgaaagcgaatttgaatcgctcacttatcatcacgtcagtcagttgagtaacagccaggatgcgctggctcgccgttggttattacgctggggtgtagtgctgctgaactgttctcatgttgtctggcaattgcgcgactgggaatcgcgttccgatccgttatcgcgagtacgggataactgtatttcactgttgcggggagtgatgagtgagcgtggcgttcagcaaaaatcactggcggccacacttgaagaattacagcggatttgcgacagccttgcccgtcatcatcaacctgccgcccgtgagctggcggcaattgtctggcggctgtactgctcgctttcgcaacttgagcaagcaccaccgcaaggtacgctggcctcttaattacttaattacaccacaggcatagcgttcaccgccaccgcccagcggtttaggttgatcggacatattatcgccgccaacgtggaccatcagcgctttgtctttgatttcatccagtgatttcagacgaggcgcgatgacggcatcggtagctttgccgtcattattgacgaccagtgcaggcagatcgcctaaatgcccggcaccttctggcccttcatgtttaccggtattttgtggatcaagatgcccgcctgcggattccgcggcgctggctttgccatctttggtggctggctggcagcttcctttggcatgaatatggaagccatgttcaccggggggtaatgctttcagatcgggcgaaaactccagacctttatcggtttcagtaatggtgacgctaccaattgactgccctaccccttgcgacgtgacgaggttcatctcgactttttcactggcagcttgtgcgccggttgcaacaaccagcgccagaatagccagactaaaacgtttcataggacctccgttcattgtgcattcctgaataagtgtaaaccagtgacacatttttgaacggcggctattcctaaaagtgcttacggtacgtcgtaccccagtgccgctttacggatacgaaaccattgttgacgggtcattttcagtgtttctgcttcgacagctgcccgtacgcgctcaattttacctgaaccgataattggcagcggctgcgatggtaaacgtaatacccaggcgtaaaccacctgttcaatcgagcccgcgtttaactcctctgccaccacagccagttcatcacgcagcggctggaaataatcatcattaaacagacgaccaccaccaaggcaggaccacgccatcggacgaacacgcagttgttgtagttggtcgagcgtgccatccagcagtaacggctgatgcaccggggatatttccacctgattagtggcaagggtaaacggcagacgtgattgcaacagggcaaattgcgcaggcgtaaagttcgatacgccaaaatgacgcactttgccgctctgatgcagatgtttgaacgcgtccgccacttcatcggcatccattaacgggtctggtcggtggattaacagcaaatccagatgatcggtcgcgagattaattagcgactgttcggcgctcttaatgatgtgatcgcggtcagtgatgtaatgaccaatgacgttttcttcacgcgcggtcgtcgcgataccgcatttactgacgatttccatccgttcacgcaggtgaggtgccagtttcagtgcctcgccaaacgccgcttcgcactgatagccaccataaatatcagcatggtccacggtggtcacgccgagatccagatgctcttcaataaaactgaccagctggcgggcggacatattccagtccatcaatcgccagtagcccatcacaaaacgggaaaactccgggccttgcggcgcaatagtaatacgctgaaccataatcgcttcctcttatcagatatgagaggagtatacgcaagattaggttcaaaagagtgatggttgctccggttcgtctgatgacgctggcttatttgcgcgtaatttgcgcattaatcgctgccgacaaaggcgcagcacctcttgtttttcgccatcgctcattttattccagttaaaacgctcatcacgactacgaaaacagccgcgacaaaacccgcgttcgtcagactggcaaattccccggcacgggctctggacgggaaagaactctaattgctccgccacttcgccctcctcagataagattattaccattattgaagctgttaatgtccaaagtagcaactttgcttgcactagaccgactggtctactacactccaacgcatgaacaaacacaccgaacatgatactcgcgaacatctcctggcgacgggcgagcaactttgcctgcaacgtggattcaccgggatggggctaagcgaattactaaaaaccgctgaagtgccgaaagggtccttctatcactactttcgctctaaagaagcgtttggcgttgccatgcttgagcgtcattacgccgcatatcaccagcgactgactgagttgctgcaatccggcgaaggtaactaccgcgaccgcatactggcttattaccagcaaacactgaaccagttttgccaacatggaaccatcagtggttgcctgacagtaaaactctctgccgaagtgtgcgatctgtcagaagatatgcgcagcgcgatggataaaggtgctcgcggcgtgatcgccctgctctctcaggcgctggaaaatggccgtgagaaccattgtttaaccttttgtggcgaaccgctgcaacaggcacaagtgctttacgcactgtggcttggcgcgaatctgcaggccaaaatttcgcgcagtttcgagccactggaaaacgcgctggcccatgtaaaaaacattattgcgacgcctgccgtttagcaggcattttttatcaccagacgaccgggagcctttatgtcatctgaaaaactgtattccccactgaaagtgggcgcgatcacggcggcaaaccgtatttttatggcaccgctgacgcgtctgcgcagtattgaaccgggtgacattcctaccccgttgatggcggaatactatcgccaacgtgccagtgccggtttgattattagtgaagccacgcaaatttctgcccaggcaaaaggatatgcaggtgcgcctggcatccatagtccggagcaaattgccgcatggaaaaaaatcaccgctggcgttcatgctgaaaatggtcatatggccgtgcagctgtggcacaccggacgcatttctcacgccagcctgcaacctggcggtcaggcaccggtagcgccttcagcacttagcgcgggaacacgtacttctctgcgcgatgaaaatggtcaggcgatccgtgttgaaacatccatgccgcgtgcgcttgaactggaagagattccaggtatcgtcaatgatttccgtcaggccattgctaacgcgcgtgaagccggttttgatctggtagagctccactctgctcacggttatttgctgcatcagttcctttctccttcttcaaaccatcgtaccgatcagtacggcggcagcgtggaaaatcgcgcacgtttggtactggaagtggtcgatgccgggattgaagaatggggtgccgatcgcattggcattcgcgtttcaccaatcggtactttccagaacacagataacggcccgaatgaagaagccgatgcactgtatctgattgaacaactgggtaaacgcggcattgcttatctgcatatgtcagaaccagattgggcggggggtgaaccgtatactgatgcgttccgcgaaaaagtacgcgcccgtttccacggtccgattatcggcgcaggtgcatacacagtagaaaaagctgaaacgctgatcggcaaagggttaattgatgcggtggcatttggtcgtgactggattgcgaacccggatctggtcgcccgcttgcagcgcaaagctgagcttaacccacagcgtgccgaaagtttctacggtggcggcgcggaaggctataccgattacccgacgttgtaatccaacattgcgagcggcgtaaagccgccgctatactaaaacaacattttgaatctgttagccattttgaggataaaaagatgcgtcttcttcataccatgctgcgcgttggcgatttgcaacgctccatcgatttttataccaaagtgctgggcatgaaactgctgcgtaccagcgaaaacccggaatacaaatactcactggcgtttgttggctacggcccggaaaccgaagaagcggtgattgaactgacctacaactggggcgtggataaatacgaactcggcactgcttatggtcacatcgcgcttagcgtagataacgccgctgaagcgtgcgaaaaaatccgtcaaaacgggggtaacgtgacccgtgaagcgggtccggtaaaaggcggtactacggttatcgcgtttgtggaagatccggacggttacaaaattgagttaatcgaagagaaagacgccggtcgcggtctgggcaactaatctcctgccgggcgtgaactcatcgcgcccgcatctttactgcatcgacaagtaatatttgtcataatgcgcgctgcaatttatccgtattaagagaatcagatgtccgataacgctcaacttaccggtctgtgcgaccgttttcgtggtttttatcctgttgtgatcgatgttgaaacagccggatttaacgccaaaaccgatgcgctgcttgagattgccgccatcaccctgaaaatggatgaacaaggctggctgatgccggacaccacattacatttccacgtcgaaccatttgtcggcgcaaatttgcaaccagaagccctcgccttcaacggcattgacccgaacgatcccgatcgcggcgcggtcagcgaatacgaggcgctgcacgaaatttttaaagttgtacgtaaaggtattaaagcgagcggctgtaaccgcgccattatggtggcgcacaatgccaattttgatcacagctttatgatggccgccgcagaacgcgcctcactgaaacgtaacccgttccaccctttcgccacttttgacactgctgcactggccgggctggcactcggacaaaccgtattgtcaaaggcttgccagaccgctggcatggacttcgacagcacccaggcgcactccgcgctgtacgacaccgaacgcactgctgtgctgttttgtgaaatcgtcaaccgctggaaacgtctgggaggctggccgctatctgccgccgaagaggtgtaatcgagtcgatgcctgatgacatgcaatgattcaggcatctatagtgaggctattccacgcatcctgcatgatattcacggggaatagcgttaatggcagataatccagacccttcatcgctcctgccggacgtgttttcaccggcgacccgcgactggtttcttcgcgcctttaaacagccgaccgctgtccagccgcaaacctggcatgtggcggcgcgaagcgaacatgcgctggtgattgcaccgaccggctccgggaaaacgctggcagcatttctctacgccctcgatcggctcttccgcgaaggcggcgaagatacccgcgaggcgcataagcgtaaaacctcacgcatcctctatatttcaccgataaaagccctgggcaccgacgttcagcgcaacttgcagatcccgttgaagggtattgccgatgaacggcggcggcgcggcgaaacggaagtcaatcttcgcgtagggatccgtactggcgatacgcctgcacaggaacgcagcaaactcacccgtaatccgccggatattctgatcaccacacccgaatcactctatctgatgctgacctcccgcgcgcgcgaaacgctacgcggcgtcgaaacggtaattattgatgaagtccacgcggtagcgggcagtaaacgtggtgcgcatctggcgttaagtctggagcggctcgatgcgctgctccacacctcagcacagcgaattggcctttctgccactgtgcgctcagccagcgatgtggcagcatttcttggtggcgatcgcccggttacggtagtcaacccgcccgcaatgcgccatccgcagatacgaattgtcgtaccggtcgccaatatggatgatgtctcatcggtcgccagcggcaccggcgaagacagccatgccggccgggaaggctccatctggccatatattgaaacgggtatccttgatgaagtgttgcgccatcgctcgaccattgtctttactaattcgcgggggctggcggaaaaactgacggcacgattaaatgagctttacgccgcacgcttacagcgttccccgtctatcgccgttgatgcggcccatttcgagtcgacctccggcgcaacctctaaccgtgtacaaagtagcgacgtttttattgcccgctcacaccacggctccgtctctaaagaacaacgagcaatcaccgaacaggcgctgaaatcgggtgaattacgctgcgtggtcgcaacctccagtcttgaactggggattgatatgggcgcggtggatctggtgattcaggtggcaacgccgctttctgttgccagtgggttacaacgcattggtcgcgccggacatcaggttggcggtgtatctaaagggctgtttttcccccgtacccggcgtgatttagtcgattccgcagtcattgtagagtgtatgttcgcaggcaggctggaaaacctgacaccaccgcataatcctctcgacgtccttgcgcagcaaaccgttgccgccgcggcgatggatgcattacaggtagacgaatggtactcccgcgtacgccgtgccgcaccgtggaaagatctgccaagacgtgtttttgacgccacgctggatatgctttccgggcgctatccctctggcgatttttctgcttttcgccccaaactggtctggaacagggagaccgggatattgaccgcccgacctggcgctcaattgttggcggttaccagcggcggcaccattccggatcgtggcatgtatagcgtgttattacccgaaggtgaagaaaaggccggttcgcggcgggtgggtgaactggatgaggagatggtatatgagtcgcgggtgaacgacattatcactctcggcgctacctcatggcggatccagcaaatcacccgcgatcaggtgattgtgactcctgctccgggtcgttctgcccggctccccttctggcgtggtgaaggtaacggacgtccggctgaattaggcgagatgatcggcgattttcttcatttgctggcggatggcgcgttcttttccgggactattcccccgtggctggcagaagaaaatacgatcgccaatattcaggggttgattgaggagcagcgcaacgcgacgggcatcgttccggggagtcgccatctggtcctcgaacggtgccgtgatgaaattggtgactggcgtattattttgcactctccctatggaagacgggtgcatgaaccctgggcggtggcgattgccgggcgaatacatgcgctatggggcgctgacgcgtcggtggtcgccagtgatgacggcattgttgcacgtattcctgacaccgatggtaaattgcccgatgccgcgatttttttgtttgaaccagaaaagttgctgcaaattgtccgcgaggcggtaggcagctcggcacttttcgccgcccgttttcgcgaatgcgccgcgcgggcattattaatgccggggcgcactccgggccatcgcaccccgctttggcaacaacggctgcgcgccagtcagttgctggaaatcgctcagggatatccggattttccggtcattctcgaaaccctacgcgaatgtctgcaagatgtttatgatcttcccgcactggaacgtttgatgcgtcgcctgaacggtggcgaaattcaaatatccgatgtaacgaccactacgccctcgcctttcgccacaagtttattgttcggctatgtcgcggaatttatgtaccagagcgacgccccgctggcagagcgccgggcatccgtactgtcgctggacagcgagttactgcgcaatctactcggacaggtcgatccgggggaattactcgacccgcaggtcattcgccaggtggaagaagagttgcaacgactggctcctggcagaagagcgaaaggtgaagaaggattgttcgacctgctgcgcgaactggggccaatgaccgttgaagacctggcgcaacggcatacaggcagcagtgaagaggttgcgtcgtatctggaaaatcttcttgcagtaaaacgaatcttcccagcgatgattagcggacaggagcgtcttgcctgtatggatgatgccgccaggctgcgtgatgccctcggcgtacgactaccagagtcattgccagagatttatttacatagagtcagttacccgcttcgcgacctctttctgcgctatctccgggctcatgctctggtcacggctgaacaactggctcatgagtttagtctcggtattgccattgtcgaagagcagcttcagcaactgcgtgaacagggtctggtgatgaatctgcaacaagacatctgggtgagcgatgaagtatttcgtcgtctgcgtttgcgctcgctgcaagccgccagagaagcgacgcgtcccgttgcagccacgacctatgcgcgattgctgctggaacgtcagggcgtattacccgccaccgatggtagcccggcgctctttgcctcaacatcgccaggcgtttatgagggcgtagatggcgtgatgcgggtgatcgaacagcttgccggagtcggtttacccgcctcactctgggaaagccagatcctgcctgcccgcgtacgcgactattcgtcagaaatgctcgatgaattactggcaaccggtgcggttatctggtcggggcaaaaaaaactgggtgaagatgacggcctggtggcactgcatctacaggaatatgctgcagaatcgttcactcccgccgaagcggatcaggcgaatcgttcggcgctgcaacaagcgatagtcgctgttctggctgacggaggagcctggtttgcacaacaaatcagccaacggatacgcgacaaaatcggcgaatcggttgatctctctgccctgcaagaggcgttatgggcgctggtctggcaaggcgtcatcaccagcgacatttgggcaccgttacgcgccctcacccgcagcagttccaacgcacgcacctcaactcgccgcagtcaccgggctcgtcgtggacgtcctgtctatgcgcaacccgtctcgccgcgggtatcttacaacacaccaaatctggctggacgctggtcgttattgcaggtggagccactaaacgataccgaaaggatgctggcgctggcggaaaatatgctcgaccgctacggcatcatcagtcgtcaggcggtgatagccgaaaatatccctggcgggtttccatcgatgcaaacgctttgtcgaagtatggaagactccgggcgaattatgcgaggtcgttttgtagaaggtctgggtggcgcgcaattcgctgaacgtctgactattgaccgattgcgcgatctggcgacacaagccacgcaaacgcgccactatacaccagtggcgctctctgccaacgatccggctaatgtgtggggaaatcttctgccctggcctgcacatccggcaacgctggttccaacgcgtcgggcgggtgcgctggtggtcgtttctggcggcaaattgttactctatctggcgcaaggtggcaaaaaaatgctggtctggcaggaaaaagaggaattactcgccccagaggttttccacgcgctgactaccgcactgcgtcgcgaaccacggctgcgctttacgctaacagaagtgaatgatctaccggtccggcaaacgccgatgtttacgctgctgcgtgaggcgggattttcaagttcgccacaagggctggattggggatagagaaaggactgacggatgcccgttcgcatccgtcagtattgcaggacggattattccgcgtccggctcttcagacttgtatttagcggcagtttctttgatcagctgctgcagttcgccacgctgatacatttcgatcacgatatcacaaccgccgaccagctcgccgtcaacccacagttgcgggaaggtcggccagttagcatatttcggcagttccgcacgaatgtccggattctgcagaatatcaacataggcaaaacgttcgccacatgcggcaagcgcctggactgcctgggcagagaaaccgcagctcggcagtttcggtgaacctttcatgtacagcaggatcgggttttcagcaatctggcgttggattttttcgatagtggtgctcattgtcttgcttcctcaaacttctttacggcagtaatctgacattgtagcgggtcagtgcggcatcggaaaataacattttcatcacgcttttgctattttatccctttgctctatttgttgcatttcaaatattcgtttcttctctgatgccggcaaactggcgtatttataaccatttttagctttcactgctgcatttttttgcgctcgccaacgaaacgtattttttaacaataaaagctattaactttctcttcttctatgcattagaatcatcaagttttgtaaatcagacgcaggcatgatagacctgcctttacagagggacgctcagtggcgcggataaaccgtatttcgatcacgctctgtgctttactttttaccaccctgcctttaacgcctatggcccatgcttcaaagcaagccagggagagttctgctaccactcatatcaccaaaaaagcagataaaaagaaaagcacggcaaccaccaaaaagacccagaaaacagcgaaaaaagccgccagtaaaagtacgaccaaaagcaaaaccgcttcttccgttaaaaaatcttccattaccgcttctaaaaacgccaaaactcgcagcaaacacgccgtcaataaaacggcctcagccagctttaccgaaaagtgtaccaaacgtaagggctataaatcgcattgtgtgaaagtcaaaaatgccgcgtcaggaactcttgccgacgcgcacaaagcgaaggtgcaaaaagctacgaaagtggcaatgaataaactgatgcagcaaattggtaagccatatcgttggggtggcagctcaccgcgtaccggttttgattgcagcggcctggtttattacgcttataaagatttggtgaaaattcgtattccgcgtacggcgaatgaaatgtatcacctgcgtgatgcagcgccaatcgaacgtagtgaactgaaaaacggcgacctggtctttttccgtactcagggacgcggcacagccgatcatgtcggcgtgtatgtcggcaacggcaaatttattcagtcaccgcgcacaggtcaggaaattcaaatcacttctctcagtgaagactactggcagcgccactatgttggcgctcgtcgggtaatgaccccaaaaacacttcgctaaaactttaccctgttgttacggcaacagggtaagttcatcttttgtctcaccttttaatttgctaccctatccatacgcacaataaggctattgtacgtatgcaaattaataataaaggagagtagcaatgtcattcgaattacctgcactaccatatgctaaagatgctctggcaccgcacatttctgcggaaaccatcgagtatcactacggcaagcaccatcagacttatgtcactaacctgaacaacctgattaaaggtaccgcgtttgaaggtaaatcactggaagagattattcgcagctctgaaggtggcgtattcaacaacgcagctcaggtctggaaccatactttctactggaactgcctggcaccgaacgccggtggcgaaccgactggaaaagtcgctgaagctatcgccgcatcttttggcagctttgccgatttcaaagcgcagtttactgatgcagcgatcaaaaactttggttctggctggacctggctggtgaaaaacagcgatggcaaactggctatcgtttcaacctctaacgcgggtactccgctgaccaccgatgcgactccgctgctgaccgttgatgtctgggaacacgcttattacatcgactatcgcaatgcacgtcctggctatctggagcacttctgggcgctggtgaactgggaattcgtagcgaaaaatctcgctgcataataactgatggcaaatgcagcattgcctgaagcgctacgcttatcaggcctacgcggatcatcgatgtaggtcggataaggcactcgccgcatccggcaagataaatcgcacgttgtcagcaactgtaacgcagaaggttatccttctgcgtttttgtttaattagctgttagcaacgcaaactgtttcaggttgttttctggctgacataaacaccagcaataatgccagtcccgcgacaatcgctcccatcaccggcacaaagctgtatcccagcccagcggaaattaccgcaccaccagcagctgctcccagcgcatttccaagattaaaggcaccaatattgactgatgaagacagacctggcgcttcactggcgacacgcatcacgcgcatctgtaacggcggtacgaccgcaaaggttgctgcgccccacaccaccatgctaatagctgcgccgaactcattgcgggccaggaacgggattgccagcataatcaccatcaacaacaacaaaaagcctttcaacgtgccgttaactgaacgatctgccagtttgccgccgagatagttaccgatagagaatccgacaccaatcagcaccagcattgccgtgacgaacaccggtgttgcgtgggtaatactttgcagtaccggagagatataggtgtagagagtaaacattgcaccagctcccagtaccgtcgtcagcaatgcagacagcacctgcggacgcattaataccgccagctcttttttcacttcaggtcgtgcccctgcaccacctttaggtaatgagaagaacagacttaccattgaaatcactcccagccccgccgttgccagaaatgacatccgccagccgatggtttcacccaaccaggtcgccgccggcacgccaccgatatttgccagggttaaccccataaacatagtggcaactgcgctggcctgtttatgttttggcaccacgcttgcggccacgactgaacccaaaccaaaaaatgctccgtgattcaggctggtcaaaatgcgtgaaagcatcagggtcatataatccggcgcgatggcggaaagtacgttgccgagcgtgaaaattgccatcaggaaaatcaacgcactgcggcgggcacgatgagaaagtagaagcgtcatcagcggcgcgccaaccattacgccaactgcataggcactgattaacattccggcagcgggaatcgagacatccacaccgcgcgcaatgacgggcaacaagcccattggcgagaactccgttgtcccgataccaaacgcgccaatcgccagcgccagcaacggatagttaattttcatgccttatctccacctcttcgcgtcattacgcgatattcattaaagtggcgaaagcatgacagcaatcacaaaaaaatgaaaataacaaaaagagaaaacacttttgccattttgctaacaaacaggaaggagatgcgagggagaacgcgctccctcgagaggaaatcagtgcagcgcggcagtcaaacccacggctacgatcaaaccgaggacgataatcgttgttaccagtgaaaatttaaggtcggtgctcatcaagttttctccttttttattaccacacaaaaagtgatattacgcatttttacacactgtgatgaaaaaatctcccgtcatttataatgataagtgtttttaccacttccccttttcgtcaagatcggccaaaattccacgcttacactatttgcgtactggccattgaccccttcctgacgctccgtgtcgtttttccggcgtaccgcaacacttttgttgtgcgtaaggtgtgtaaaggcaaacgtttaccttgcgattttgcaggagctgaagttagggtctggagtgaaatggaatggcaacaataaaagatgtagcgaaacgagcaaacgtttccactacaactgtgtcacacgtgatcaacaaaacacgtttcgtcgctgaagaaacgcgcaacgccgtgtgggcagcgattaaagaattacactactcccctagcgcggtggcgcgtagcctgaaggttaaccacaccaagtctatcggtttgctggcgaccagcagcgaagcggcctattttgccgagatcattgaagcagttgaaaaaaattgcttccagaaaggttacaccctgattctgggcaatgcgtggaacaatcttgagaaacagcgggcttatctgtcgatgatggcgcaaaaacgcgtcgatggtctgctggtgatgtgttctgagtacccagagccgttgctggcgatgctggaagagtatcgccatatcccaatggtggtcatggactggggtgaagcaaaagctgacttcaccgatgcggtcattgataacgcgttcgaaggcggctacatggccgggcgttatctgattgaacgcggtcatcgcgaaatcggcgtcatccccggcccgctggaacgtaacaccggcgcaggccgccttgccggttttatgaaggcgatggaagaagcgatgatcaaggtgccggaaagctggattgtgcagggtgactttgaacctgaatccggttatcgcgccatgcagcaaatcctgtcgcagccgcatcgccctactgccgtcttctgtggtggcgatatcatggcaatgggcgcactttgtgctgctgatgaaatgggcctgcgcgtcccgcaggatgtttcgctgatcggttatgataacgtgcgcaacgcgcgctattttacgccggcgctgaccacgatccatcagccaaaagattcgctgggtgaaacagcgttcaacatgctgttggatcgtatcgtcaacaaacgtgaagaaccgcagtctattgaagtgcatccgcgcttgattgaacgccgctccgtggctgacggcccgttccgcgactatcgtcgttaatcacccgttgcgggagtctcttccggctcccgcagccactccttattcagcgtctcactatcgccgagatactcaagcaaccaggttaacgcaggcgacatatcattttgctgccatgtcagacaacatgccgaatccggaaaggggttttccagttctaatgctacccacttcccctcattaagccacggtttggcgaaatgtgttggcaccatccctatgcataatcctgccgagatacaggttgccgatgattcccagtcaggcacgacaactcttttttggttatccagcaaccaggtaatacgtttaggtagcgttcgcgaggtgtcttcgcgcaccaacgacggccagttgcgcaacgtatcatcgctgaacgggccatccatcaacgccagcgggtggtgactggcaacaacgcaactccagcttagcatccccatatcccggaaggcataacgaccgcctaccggaatcgcgcgtgttgcgccaatcgccagttccacgcgcccgtcggaaagcgcatcccagacaccgttgaacacttcctgaaagacaagaagttcgacatcatcaaaatggcgataaaaatcaacgatcatctgccgtgtacgttctggcctgacaatattatccactgcgatagctaactgaccgcgccagccgttcgctatctgctgacattgctggcgggtgatctgcatttttttgacaacagagcgcccttctttgagaaaccacgctccagcagcggtcagctccacatcacggtgccgtcgttcaaagagcggcaccgccagccactcttccagctgacgcacggtatagctgaccgcagaaggaacgcgatgcagctcctgtgccgcagcgctaaaactaccattacgcgctaccgcatcaacaacttcgagtgaatattctgaccacatagtctgcctgcaaaatttttgaaaccagtcatcaaatattaccgtttcacaacactaatttcactccctacactttgcggcggtgtttaattgagagatttagagaatatacatgcaacctgggaaaagatttttagtctggctggcgggtttgagcgtactcggttttctggcaaccgatatgtatctgcctgctttcgccgccatacaggccgacctgcaaacgcctgcgtctgctgtcagtgccagccttagtctgttccttgccggttttgccgcagcccagcttctgtgggggccgctctccgaccgttatggtcgtaaaccggtattattaatcggcctgacaatttttgcgttaggtagtctggggatgctgtgggtagaaaacgccgctacgctgctggtattgcgttttgtacaggctgtgggtgtctgcgccgcggcggttatctggcaagcattagtgacagattattatccttcacagaaagttaaccgtatttttgcggccatcatgccgctggtgggtctatctccggcactggctcctctgttaggaagctggctgctggtccatttttcctggcaggcgattttcgccaccctgtttgccattaccgtggtgctgattctgcctattttctggctcaaacccacgacgaaggcccgtaacaatagtcaggatggtctgacctttaccgacctgctacgttctaaaacctatcgcggcaacgtgctgatatacgcagcctgttcagccagtttttttgcatggctgaccggttcaccgttcatccttagtgaaatgggctacagcccggcagttattggtttaagttatgtcccgcaaactatcgcgtttctgattggtggttatggctgtcgcgccgcgctgcagaaatggcaaggcaagcagttattaccgtggttgctggtgctgtttgctgtcagcgtcattgcgacctgggctgcgggcttcattagccatgtgtcgctggtcgaaatcctgatcccattctgtgtgatggcgattgccaatggcgcgatctaccctattgttgtcgcccaggcgctgcgtcccttcccacacgcaactggtcgcgccgcagcgttgcagaacactcttcaactgggtctgtgcttcctcgcaagtctggtagtttcctggctgatcagtatcagcacgccattgctcaccaccaccagcgtgatgttatcaacagtagtgctggtcgcgctgggttacatgatgcaacgttgtgaagaagttggctgccagaatcatggcaatgccgaagtcgctcatagcgaatcacactgatctatatcgatatacttatacttaggctgctaacaaaattttgttgtatgattgaaattagcggcctatactaatttcgagttgttaaagctacgataaatattatgtttttacggggacaggatcgttcccgactcactatggatagtcatttcggcaagggttcctcctttccctctgttctacgtcggattatagactcgcggttttttctgcgagatttctcacaaagcccaaaaagcgtctacgctgttttaaggttctgatcaccgaccagtgatggagaaactatgagttcatcgtgtatagaagaagtcagtgtaccggatgacaactggtaccgtatcgccaacgaattacttagccgtgccggtatagccattaacggttctgccccggcggatattcgtgtgaaaaaccccgatttttttaaacgcgttctgcaagaaggctctttggggttaggcgaaagttatatggatggctggtgggaatgtgaccgactggatatgttttttagcaaagtcttacgcgcaggtctcgagaaccaactcccccatcatttcaaagacacgctgcgtattgccggcgctcgtctcttcaatctgcagagtaaaaaacgtgcctggatagtcggcaaagagcattacgatttgggtaatgacttgttcagccgcatgcttgatcccttcatgcaatattcctgcgcttactggaaagatgccgataatctggaatctgcccagcaggcgaagctcaaaatgatttgtgaaaaattgcagttaaaaccagggatgcgcgtactggatattggctgcggctggggcggactggcacactacatggcatctaattatgacgtaagcgtggtgggcgtcaccatttctgccgaacagcaaaaaatggctcaggaacgctgtgaaggcctggatgtcaccattttgctgcaagattatcgtgacctgaacgaccagtttgatcgtattgtttctgtggggatgttcgagcacgtcggaccgaaaaattacgatacctattttgcggtggtggatcgtaatttgaaaccggaaggcatattcctgctccatactatcggttcgaaaaaaaccgatctgaatgttgatccctggattaataaatatatttttccgaacggttgcctgccctctgtacgccagattgctcagtccagcgaaccccactttgtgatggaagactggcataacttcggtgctgattacgatactacgttgatggcgtggtatgaacgattcctcgccgcatggccagaaattgcggataactatagtgaacgctttaaacgaatgtttacctattatctgaatgcctgtgcaggtgctttccgcgcccgtgatattcagctctggcaggtcgtgttctcacgcggtgttgaaaacggccttcgagtggctcgctaaaggctattctatcgccccctctccgggggcgatttcagatcaggcttctgtgcctggttgattcatggcattttctcgtgccgccagcacacgttctaccgtatctaccactgcctgagtttgtggatcgatttcaatgttgacgcgtgcgccaagttttttcttcccaagagtcgtgcgttccagtgtttccggaattaaatggacgcaaaaacgcgttggcgtgacttcgccgacggtcaggctaataccgtcgatgccaataaatcctttgtacagaatatatttcatcaactgactatcctggactttaaaccagatctggcgattattttctgaggttaatattttcgccacttcagcagtggtcataatatgacctgacattaagtgtccgccaatttcatcactgaatttcgccgcacgctcaacgtttacccaatcccccacttttaaatcgccaagattggtaatgcgtaacgtttctttcatcaggtcaaaactgacatggttgccgttaatttccgtcacggtcaggcagcaaccgttatgcgccacggaagcaccggtttccaggccgtccagcatgtggtcgggtaactccaccacatgcgtacgaaaatttggtttctcgtcaatcgacaccagttttgcggtgccctgtacaatccccgtaaacatacttacaactcctgaaatcagttaagacattctgttcagcacaatagcaggtggaaaacgcccttaccagtgaaggggtaagaatggctattttttcactggagaattaataaatcctcgctacaatagactgaatttcccctgcttcttctttttgctgcccattcaggcggctttttagtctctcatataactacaaataaaaggtgttcacgtgcagaagtatatcagtgaagcgcgtctgttattagcattagcaatcccggtgattctcgcgcaaatcgcccaaactgcgatgggttttgtcgataccgtgatggcgggcggctatagtgccaccgacatggcggcggtcgctatcggtacttctatctggcttccggcgatcctctttggtcacggactgctgctggcattaacgccggttatcgcgcaattaaatggttccggtcgacgtgagcgcattgcgcatcaggtgcgacaaggtttctggctggcaggttttgtttccgttctcattatgctggtgctgtggaatgcaggttacattatccgctccatggaaaacatcgatccggctctggcggacaaagccgtgggttatctgcgtgcgttgttgtggggcgcgccgggatatctgttcttccaggttgcccgtaaccagtgtgaaggtctggcaaaaaccaagccgggtatggtaatgggctttatcggcctgctggtgaacatcccggtgaactatatctttatttatggtcatttcggtatgcctgagctcggtggcgttggttgtggcgtggctactgcggcggtgtattgggtcatgttccttgccatggtttcttacattaaacgcgcccgctccatgcgcgatattcgtaacgaaaaaggcaccgcaaaacccgatcctgcggttatgaaacgactgattcaactcggtttgccgattgcgctggcactgttctttgaagtgacactgtttgccgtcgtggctctgttagtgtctccgctcggtattgttgatgtcgcaggacaccagattgccctgaactttagttcactaatgttcgtgcttccaatgtcgctggcggcagcggtaactatccgcgtaggttatcgtctgggtcagggctcaacgctggatgcgcaaaccgctgcgcggaccgggcttatggtgggtgtctgtatggcaaccctgacggccattttcacggtttcactgcgggagcaaatcgccctgttgtacaacgacaatcccgaggttgtaacgctggctgcgcatttgatgttgctggcggcggtatatcagatttctgactcaatccaggtgattggcagtgggattttgcgtggttataaagatacgcgttccattttctatattacctttacggcttactgggtgctgggcttgccaagcggctatattctggcactgaccgatctggtcgttgaacctatggggccagcaggcttctggataggctttattattggcctgacgtcggcagccattatgatgatgttgcgtatgcggttcctgcaacgtctgccgtcagccatcattctgcaacgagcatcccgctaataaagacaaggcgcaaccttcacgggttgcgcctgtatttttacgcaggctggagcgttgcgccaatcccgtcttcgtctggctgtaatttcagagcgttacacagagtttgccgactggcatctgttatctcaacgtgtatatccccggtaacttcccctttcacattgatgaagtcaggtgaaatttcttttgcactggtttgcaggcaaatcgctccctctccgcgcaggcgtttcactttcagttgcacatgcgttgccgcatcagtgatcagccacagttttccaccattcagattgatgttaccaacaatgaaagtgacactgtcaccttttaccgtactgccgtctagaatcaacacaccgccctgctgtacagtaatcgttgattgttgcagctctgcgccataaccaataatcattgaagcgccgtccagtaatgcaacactcccggtcagttcaaccggtgcgcgatcttcctctacgacaaaattttcgtccgcgctggtgggtgacaacaggatcactgtcccaccttgtattaccgcgttttccagcgtaccggcatgcacttcagcccgaccacccacattcacggacaggttttgcgtcttaccggaactgtagagctgaaggccatccgtccccagacgataaatggatccattctcaacaatagtgtcagagtcttcaccaccgagattattcatggtgccaccagcaagcaacgtatcactggctttcccggccagcataaaaacgccgccctgattaatctcacaattgctggcttccccacctggatacaccaacaattcaccaccttcatctaccacgaccgctgaggttgtcccattaaccaacaggccgccctcttgatcgagaatgattttttccgcgcgatgtccttccagtacacgcaggttaccgccattttccagcaacaaaccgcaggcataacctttatcaacgctgaattcaccttcgggatggcggccattaaccgtagcgagcgtagagagactaattgcgcctccctcggactgaacaatatctgtggcaatggcaccatcgctgaccgatagcgtgccattgttaccgtactgtgtgcatttggcgatcccaccggttgccactttcaaccagccagcccccgtgaccacggtattttcggctcttccgccagcttcaacaatcaactcgccttcagtaagttgcgtcgcgccaatgacctcgccggtcttaacaatttgcacgttcccgtcgctcatcaagtttttcgcatcagatcccatgatttattcctttgctgcatctgtgtgcctttattgctacctaagtgtaaaggctacggaggatttatccacgacagatttgagatggtggcaaacaactctgtttaaactctgatacacgaattattgggttgtatcagatgtaaatgcgatcctgaataaaaatcacccttgcaaatcaacaaaatatagccaatttgcttaaaagctctgcaaacggtcgaaatagcgcagaaaattacgttttgcctcttgccaccttcccactctgccgctaatattcgtccccgttgtcacctacaacgttgcgttcatagctcagttggttagagcaccaccttgacatggtgggggtcgttggttcgagtccaattgaacgcaccatcctgcgtccgtagctcagttggttagagcaccaccttgacatggtgggggtcggtggttcgagtccactcggacgcaccagattttcttaatctggtcttctcctttttccctctgtttcttctctgtatccaatacgttaaaagatttacactgtcttcgtatgcgttatcagaaggagaatcgctatggcaactttgttacaacttcattttgcttttaatggcccatttggcgacgcaatggctgagcagcttaaaccacttgctgagtcgattaatcaggaacctggttttctgtggaaggtatggacagaaagtgaaaagaaccacgaagccggtgggatctaccttttcactgatgaaaaaagcgcccttgcctatctggaaaaacatactgcccgactgaaaaatctcggcgttgaggaagttgtcgccaaagttttcgatgtcaatgagccacttagtcaaatcaatcaggcaaaactcgcctgacagaatttaatcaagggcggttagcgcccttttcatccctgtctgaaatttctcaaattctaaaaatctcaaccaaacttatctgataacactaaattcgaaagaatgcgtacaggtaagtaacaatgaaaaaaattgctattgtgggtgccgggcctacggggatctacaccttattctcgcttctacagcaacaaactccactttctatttctatcttcgagcaggctgacgaggccggtgtcgggatgccatacagtgatgaggaaaactcaaaaatgatgctggcaaatattgccagtattgaaataccgccgatttattgtacgtatctcgaatggctacaaaagcaagaagacagccatctccagcgttatggcgttaaaaaagaaaccttgcacgatcgtcagtttttaccgcgaattctgctgggcgaatatttccgcgatcaatttttacgactagtagaccaggcacgacagcaaaaatttgcagtggctgtttatgaatcatgccaggttaccgatctgcaaattacaaatgctggcgtcatgctcgctacaaatcaggatttacccagcgagacgtttgatttagcggtgatcgccacgggtcacgtctggcctgatgaagaagaagcaacccgaacgtattttcccagcccgtggtcaggcctgatggaagcaaaggtcgatgcgtgtaacgtgggtattatgggaacatccttgagcggactggatgcggcaatggcagtggctattcagcatggttcgttcattgaagatgataaacaacacgtcgtttttcaccgcgataacgcaagtgaaaagctaaatatcacgttgttgtcgcgcacgggtattttacccgaagccgatttctattgccctattccctacgagcccttacacatcgtcaccgatcaggcattaaatgctgagattcaaaaaggcgaagagggccttttggatcgggtatttagattgatagtagaggaaatcaagtttgctgatccagactggagtcaacgcatagccttagagagcctgaatgtcgattcctttgctcaagcctggtttgccgagcgcaaacaacgcgacccatttgactgggcagaaaaaaatctccaggaagtcgaacgcaataaacgagaaaaacatactgttccctggcgttatgtcattctgcgcctgcatgaagccgtacaggaaattgttccacatctgaatgaacacgaccataaacggttcagtaaaggccttgcccgggttttcatcgataattatgcggcaatcccttcagagtctattcgtcgcctacttgccttacgtgaagcgggaatcattcatattctcgccctcggtgaagactacaaaatggaaattaatgagtcgcgcaccgtcctgaaaacggaagacaacagctactcgtttgacgtttttattgatgcccgcggacaacgtccgcttaaagtgaaagatatccctttccctgggctacgcgagcaattacagaaaacaggggatgaaatccctgatgttggcgaagattatacgttacagcaacccgaagatattcgtgggcgcgtagcgttcggcgcgttgccctggttgatgcacgaccagcctttcgttcagggacttacggcatgtgcagaaattggtgaggcgatggctcgggcggtcgtaaagcctgcatcccgtgctcgtcggcgtctttcgtttgattaaaggtaaagctatcagcactcaacaaactgatgctgttcattaagacgatagcggactccggctcgaatattgttttcaccttcaatggcgacggcgaagcgaactctttcgccgtcatgatatgccagtgcggcgcttcctcctggcccgagaataattgagtcgaccacgcccgtgctcactaccgttgaattttcaccgctggcaatgatgtgtacattgtcgccgctgttggcaattctggcgtttgcgccaaagctggcgatttgcaccaggtcaccattactggcgacatgacaccgttcacccaatgtacaaacgcgtactcgcattccggtattcgcaatccgactgctatctccagcgctgcttatccgcgaagaattaccggttacagcaacccgtgcgcgttcaccggagctgccaatgtgactgttaaagccgacacttccaatccgcacgctataacccatactggcaatttgcgcggcatacccagcggttgcgattctggcgttatcctcacaacagccgatgcgagcatgatcgtcgctgcgggcaaactgactgcaaaatggtctctctccggggtctgtggccagtttttgcatagaggaaacttcctgatgcgcgaagttttcatccgccagccattttttccacgcatactcaaccagactctccgcccagtccgtatatccttcctcaatcagtgcatgatgaatatcggcataactaccgccgcgtgggaaatggcgcaggaaccagcgatacatcaccgctccgatacgccattctcgcaggtctgcttgtgtaatgatcattcgttagtgccggtgatagccatcgaccatgcttttaaaggtttcgtgtggcgtacgccccgtggtgcaaagataaagatgaccgaagataaaaaagaggcttataaatgccagagcaaaatgtgtctgcaataaccagtatcttacgccaggaaacacatctcccacggcttgcggatagagacacagcagccccgtcaatagtaacaacggcagcaatccatacatgacaccaacataggcgacctgctgtaagggattaaatttagactgggttgttgccgggaaaggatgttcttccccctgcataatgccaaacaaataaaatcgcgtttgttttgccgctcgttccagccacccctgacgacgaatgcgatagtggtgaccattatccccaacggcattgatcagcacaaagccgagccagcatgccagtaacaaaaatccgcaaacttcatgcaccgcaaccagacttttaaccgcagttgcgcccaccatcgcaaagtgatttatcagcccactggccagcaacaatacaaagagtaacgcattcgaccagtgccataatctgaccgctttgctgtaaagataaatcttctcaccatgatcggtggctgatttcttcacgccacgagcacgaagcaaggcatgcagccccagcaccaaccacatcccaaccagcaatactccggcaatgatcaaccacaccggccaaaattcgggagtgaactgtggcacatagttcgctaactggctctgaaactgttcagcatgttgcgacgggttcatacattttcctttttaatcaaatgttgaccgaaccggcgatacagatgcggtttcccggcaccaggtagctgatattgatagtatttattttgctgcaaccacgcctgaatttctgggctatcttcgcgaccaaagatcaatgcgtgttccgggcaggcgctgacgcaaatgggcggaaagccttttgccagtcgggactcagcgcagaaatcacatttatctgccactttagtgacagggttaaggtagcgaacctggtacggacaagcgccaatgcaataactgcagccgatgcactgcgatttttctacccgcacgatcccctgctcatcacgccacgacgcccccgtcgggcaaacgtcgatgcacggagcatcttcgcagtgctgacatgactggcgaaaaaagtgatactgcgtttcgttgtcgttatcggtgactggaatgtgtgctatcgataaacggcttccctgagcggggacgtggttagttttacggcatgcgcgggcgcaaatattacagccattgcaccgtgactcgtcatgaatcatggcataccgaacttccttttcttgcctcgtgttcgctaacagagaagacgcagaaccagtaaaaaagattactgttcccatccccagaacaaatttgcgtcgagtgaaggacatctgattatcccctaatgcagtggctgcaactgtccaccctatccatgacatctccctgaaatttcaggggttctgaaactgctctacctcgaaccattcgcataagccataagccttgccataggtcataaatcgctcgctaaacaagtacaacaccgccgtcgatgactccacctgccgtatatcggcatattcaggtgcaacatccatcgcggcgatcgcggcttcaatctgcgcttcctggaagtaatatggcgcttgcatcagcatggcgactttgtaaggacgaggatacgtctggcactcaaaacgaacggcgtgtgcaatggcgcgacaaatgtcctgctccacaacttgcaaagacatcgccgcgtagttttcactcatggcctgcgttgagtaatagtaatcatccttgcttcccgtcaaacaagcgatatccgcgtagtctccgttctgcttaatgctttccagcaaaactgacagttcctcttctgcaaccaaatagggtggcgagagaaacacggcgcgcgccaccagctgcccagccgcagaatgctggcgaatgaactcagccaggatttcagcaggttctggttcggttaccgtatcaacggggtgacgcatcccctgcaaccattgccgcttcgcctcgtcaacttcgctgactttcgctaacggcaattcatcctgatggttcatcttacccattccttacgcaggcagtagattgtgtgctgccagatcggcggcaatatcttccagccccagacgctgcaatgtttcgcgggttggacaaccaagctgtgggtcccagcccatttctttgtagaacatcgtgagcgaagcatgcatatcgtcacgatccattttgtcagtaccttcagtaaagaccgggatctgcggatccttgtcgaatacccaggaacagataagatcgtgttcattacgcatatctttggtttgcatcagttttaccgtgtaggcacgatgcaacgtaaaaatacgctctgcagctaaatctaatttttcctgagtcatctcttcgccggtgatcgctttgaagaatttggcttcaagcgccagatcgccccggtaattacggcttttcagcggcgaaacggtcattggccagacccagttgcacagggtgacggcgttatgcaaacagacccgcaacagcgaccactttgcatatttaatttttgcgtcattgattggcgtgtagtttttggtttcatcgtaagcatcttcagaaccaaaaagttctttcgccacttcacgttgcagtttcaatggcaagccggaaccaataaagttgatatgggtatgcgtcatgcagtcacggttgaacatacagttaacaatggaaccgacctgcgctgacgcttcattggcatggtgaaccggatagccaaacggcgaccagagtttatttttcgcgtagccccagtactcttcacccaaattccagcgttctgcgatggcatatgaaccatcagccaggtgactcagctcacccacacgatgcgccagacggtagtaaaaatctttaatgaagttaacgtcacccgcttccagttgatcccagcgaatttctgcatactcttcagctggcagaacacgcttgaacacacctttgctgtaacaataagtaaagtcgcgatgcaactgcccgtagttacaccataggccgtagtcatcgaacaaattcagacccaccaggttaccaatcacacgaccatcgtctttatcttcaaaatctttcggcccgttcgggaagatggtggtatggacaaagtttgctacacaagtgttaccacctgtgctgggcacgccaaactctttcacccgaggaatattcatttgggtcatacaacggatcgggcaagagtggcagccgctcatttttactgtgtatttctctgccgccggtcctaagtcaaaaacggatttataggtacgaaagccgaccgtattctgattgcctggcggaatttcacccgtttcaatcggaccaccttcagccgcgccccaaaacagccctttacgtgctgtccagcgtgacttgggatctgaatactctgcccacgattgtggcgtacttggcacgacatggttgttattcgcaccaataagttcagtcatcatgtaatcattgagacgcttcatctcctgacgatcggcaatgttgacccctttcgtcccttcaaccgcaatcgctttcaggtttttcgaacccattattgcgccagttcccgcaccgccgctgtggttacggctattcaacatgccagagagaggaacaaggttttccccagcctgaccaatagccgccacacaggtttccggactggtcaatcgacaaatttcttccgtcgttgcgcgcgtcccttttccccataagaaatcggctttttccaggctaactttgtcatctttaatcttcagccataccggtgatttcgccttcccttcgataataatgacgtcgtatccagcgaatttcatttgcgctgcaaaaaagccacccatatgggcatcgacgactaaatttcctttggtaaaagtagaaagtgaggtgatatttacgcgagaactacagggggcaccagatccagttaatgggccggtagcaaagactaatttattcgcttcatcgaaaggtttcgtgcctggcggtacttcgtcatacataattttgtagccgaagcccatgccaccgacaaaacttttaaacttactggaatcttcgagggtaatatttcctgtcgtgagattgactcttaatatattacctgtccaaccgttagccatgattttttcctttgcaagattcacacagtaatatctttccactcgataatttttaacgcccctgttgggcaggcgtttgcgcattcaccgcataacacacatttcgaggattttttactttcggtatttacggtggccatcatccacgggcatgccgtagtacaggcgctacagccaatacagcgtttatgatcgacggtaatacagccttctttctgctgccaggtaatcgcaccaatcgggcagacgttcatgcattgcggctctttgcattgacggcaggtgtccgcggtatagttgagatcgccatacaggccgccgccagagccaaccccgttgtcgccaaagaaataattgcgatggattttgatacgggagaagaatgtccctactgagccatcgttgaagttggtacaagagatttcacagcggtggcaacccgtgcatcgcgctcgctgggtcaccagcacccctttgggggtatttatcaaccctactgtgccgctatcaatatcttcctgtttgcaacccaaaagtgacagtaacgcaggggcaattgttagaccagcaaggccttttcctgatatacgcaagaattctaatcgcgttaagccaatatctaatagtggacgatcaaccgggttcatttatttcgcatcctcttcgcaaacacagtgctgacaattcagcagcctgatattaagcattcaactaatacgctgctgactctgtccccaacaccagatattttccctaacccgatagtgtatgagaaaagattaacgccgataaactaatcctttatggttaggagaaaaaataatgtgattattctgagcccttaacattgatcgttatcaattaaaattacaaagcaagaaattataagtgaactgatatttattatcatttgaaataaatttaacttaagcgacaattatttgtgactttcattgcagaaaataaaaataacattatcgctataaattaaaatacataccgaaattcgtataatttcagcagttgttatttagaatgattaactggaccgcaactgaagcaagaatatcaggatgaagcttaccgcctcatcctgaatggtcattttaccagtgcgttaatgacggtttccatcgcctgcttttccagctcactgcgctgaatgcgtttattggctaatgctgtacgtaatacgcctgcgataacaatatgctttggttcctgccccagatcgcgcatttccagcacaactttaccgacaactctgcacatttctcggtacagttcatcctcttttgtccgatttcccattctttatacctatttatcatgccaactatcagcatatatcaatctaaccaattaaacaaaaatcaaacaaaatcagacaaataacgcgataaattattttaactgtagcaattgagcgatgatatatttatacaccggatgaactttcacttatcctcacactgacaacttcggcaccagacgttgcgcaaacagtgaagtttttgcgtaaccttttccctggaacgttaaatctttgataacaatttattgtctaacaagttgtatattttttgaaacgctgtttttgttttccttttggattaatttcagcgtataatgcgcgccaattgactcttgaatggtttcagcactttggactgtagaactcaacgactcaaaaacaggcactcacgttgggctgagacacaagcacacattcctctgcacgctttttcgatgtcacctatccttagagcgaggcaccaccactttcgtaataccggattcgctttccggcagtgcgcccagaaagcaagtttctcccatccttctcaacttaaagactaagactgtcatgaaaaagaccaaaattgtttgcaccatcggaccgaaaaccgaatctgaagagatgttagctaaaatgctggacgctggcatgaacgttatgcgtctgaacttctctcatggtgactatgcagaacacggtcagcgcattcagaatctgcgcaacgtgatgagcaaaactggtaaaaccgccgctatcctgcttgataccaaaggtccggaaatccgcaccatgaaactggaaggcggtaacgacgtttctctgaaagctggtcagacctttactttcaccactgataaatctgttatcggcaacagcgaaatggttgcggtaacgtatgaaggtttcactactgacctgtctgttggcaacaccgtactggttgacgatggtctgatcggtatggaagttaccgccattgaaggtaacaaagttatctgtaaagtgctgaacaacggtgacctgggcgaaaacaaaggtgtgaacctgcctggcgtttccattgctctgccagcactggctgaaaaagacaaacaggacctgatctttggttgcgaacaaggcgtagactttgttgctgcttcctttattcgtaagcgttctgacgttatcgaaatccgtgagcacctgaaagcgcacggcggcgaaaacatccacatcatctccaaaatcgaaaaccaggaaggcctcaacaacttcgacgaaatcctcgaagcctctgacggcatcatggttgcgcgtggcgacctgggtgtagaaatcccggtagaagaagttatcttcgcccagaagatgatgatcgaaaaatgtatccgtgcacgtaaagtcgttatcactgcgacccagatgctggattccatgatcaaaaacccacgcccgactcgcgcagaagccggtgacgttgcaaacgccatcctcgacggtactgacgcagtgatgctgtctggtgaatccgcaaaaggtaaatacccgctggaagcggtttctatcatggcgaccatctgcgaacgtaccgaccgcgtgatgaacagccgtctcgagttcaacaatgacaaccgtaaactgcgcattaccgaagcggtatgccgtggtgccgttgaaactgctgaaaaactggatgctccgctgatcgtggttgctactcagggcggtaaatctgctcgcgcagtacgtaaatacttcccggatgccaccatcctggcactgaccaccaacgaaaaaacggctcatcagttggtactgagcaaaggcgttgtgccgcagcttgttaaagagatcacttctactgatgatttctaccgtctgggtaaagaactggctctgcagagcggtctggcacacaaaggtgacgttgtagttatggtttctggtgcactggtaccgagcggcactactaacaccgcatctgttcacgtcctgtaatattgcttttgtgaattaatttgtatatcgaagcgccctgatgggcgctttttttatttaatcgataaccagaagcaataaaaaatcaaatcggatttcactatataatctcactttatctaagatgaatccgatggaagcatcctgttttctctcaatttttttatctaaaacccagcgttcgatgcttctttgagcgaacgatcaaaaataagtgccttcccatcaaaaaaatattctcaacataaaaaactttgtgtaatacttgtaacgctacatggagattaactcaatctagagggtattaataatgaaagctactaaactggtactgggcgcggtaatcctgggttctactctgctggcaggttgctccagcaacgctaaaatcgatcagctgtcttctgacgttcagactctgaacgctaaagttgaccagctgagcaacgacgtgaacgcaatgcgttccgacgttcaggctgctaaagatgacgcagctcgtgctaaccagcgtctggacaacatggctactaaataccgcaagtaatagtacctgtgaagtgaaaaatggcgcacattgtgcgccattttttttgtctgccgtttaccgctactgcgtcacgcgtaacatattcccttgctctggttcaccattctgcgctgactctactgaaggcgcattgctggctgcgggagttgctccactgctcaccgaaaccggataccctgcccgacgatacaacgctttatcgactaacttctgatctacagccttattgtctttaaattgcgtaaagcctgctggcagtgtgtatggcattgtctgaacgttctgctgttcttctgccgatagtggtcgatgtacttcaacataacgcatcccgttaggctccacggaatatttcaccggttcgttgatcactttcaccggcgttcccgtccgcacgctggagaacaaggctttaatatccggtgcattcatgcgaatacaccctgaactgacgcgcaaaccgacgctgtccggcgcactggtaccatgaatgaggtattcgccattaccatgcgcgaggcgcagtgcgtaacgtcctagcgggttatttggtccggcaggaacgactggcggtaatttaatgccacgctccagcgaacgctgacgaatgcctgccgtaggcgtccaggttgggttagggattttctgcccaacacgcgtttccatcaccggcgtttccagcccctgcaatccaatacctattggataaacctgcacaatattttctcccggcggataataataaaggcgcagctctgcaaggttaacgataatcccctgacgcggtgcatcaggtaataacagttgtgaaggaatagttatcgtcgtaccaggttttggcaccggggcgatagtgttattggcttcaaggatcaacattgccgcagtatcaaaacgtcgggcaatagcctgaaggtttttatccccttcttgcaccgtatacgtttgattttgcccaaccagtcggcttccggttggtggtagcggataatcaaccgcccaggcagcctggatggcgctaaaagcgccgataagcgtgagtgtaagcaaagacgcgcgtttcattgtaaacctcctgtatttgccggagactcacgctgaaacgtcggatggcgcttatgttcacctgaaaccaaaacactcctgtgcaggtcagtgtaaacattgaccatccggcaatgtgagccaaccggatgaaagctgtccttttagtttagctaagtgcagcggctttggcgcgaattgcgcgaatcatcgcttccagaccttgtgaacgagatggggtgagatgttgggtgagcgccattttttcaaaccacggacgcacatcgaaattgacaatatcctgcggcgtcatctgatcgtagagaataaagacgaccgcaataagccctttcacaatcgccgcatcgctgtcgccctgtaattcaataattccctgggcattctggcgcatgacaatccacacctgactctgacagccctgaatgctattttgtggacttctgtcttcgtcgcgtaattctggcagacgctggcccagctcaataatgtagagatatttctcttcccagttggcgcagcgtaaaaaattacgcagcaacttttctttatccggcaataaagccatagtgcctccctgttatcccagcaaacggtgaatacgttgcaggccggtcaccagacgatccacttcttcatgggtgttatacatggccagcgacgcccgacacatcgcagggacgttgtaataggccatcaatggcattgcgcagtgatgtccggtacgcacagcaatgccgtaattatcgagaaaactgccaacatcataggcgtggtgtttaccgagattaaaagcaataacgccaagcctgttttgtgggccatagagagtgagatccggtacagattccagctgtgatagcgcataatgcatcagattctgttcatactcggctatgttattaagccccagcgccgaaacatactccagcgccgcgccaagaccaatgatgcccccggtattgggtgtaccggcttcaaaccgccatggtgctttggtccaggtagtgccttcactcaggctgacggtggcgatcatagaaccgcccccttcccacggcggcatctcctgcaacaaggcttctttcacataaagaatgccaattccggtggggccatacagtttatgcccggagaacacgtaaaagtcgcaatccagcgcctgaacatccaccggatgatgcatcaccgcctgagcgccatccaccagcacttttgcgccatgctggtgcgcaagcgtgatcatttccgccagtggattttctgtgccaagcacgttggagacatgagtaattgccagcaggcgagttttctcatcaaacagcgtaggcagcgtctccagttgcaacgtaccatcgggattgagcgggatcacacgcagctctgcgccaacgcgtgcgcaaagcatctgccagggaacaatgttagcgtggtgctccatctgactgatgatgatgttatcgcccgcccgcacgttgctgttgccccagctattggcgaccagattgatcccttccgtcgtgccgcggacgaacaccagctcttccgccgaacgggcattaataaacagcgatgcccgcttgcgcacgttctccattttctcggtcgcctgggcgcttaaggtatgaataccacgatgcaccgccgcgtagccatgacgataaaactcggcctcggcgtcaatcacctggctcggtttctgcgcactggcggcgctgtcgagataagccagcggcaaaccgtttacctcacgcgaaagcaccggaaagtcggcccgcactttgtcgacggaaaaaatcatcttgcacctcctggcagccgttgaccgattcgggccagcacctgctgtttaagcccctcatcacgcagtgcttccgtcagttcggcagcgaaggcgtaaatgatcatctgctgggcatcctgctgattgatcccgcgcgagcgcagatagaatatctgttcatcatcaatacgccccaccgtcgcgccgtggctgcatttcacatcatctgcatagatttccagctgcggtttcgtatccacttccgccagtttgcccatcagcagattgttgttggtcatctgaccatccgttttgatggcgtgctgcgcgacgttgatcaaaccgttaaataccgcgcggcctttgtcgctgacgatagttttgtgcaactgtcggctgttacaaaaacctttattgtgttccagccaggtacgggtatcacacacctcgtttttcaccggcatcgccaggctattgatccgcagcgtgctgttttcgccattgagttgcgtactggtgttgtgtcgtaacactgcgccacccagcaggaaactgtggctaaatgcggtggcatcctcagccagcaacaaatcgttatgagcaaagtggtgactgagcgggttttcaaacgccagcttgatatgctgcaagtgggcattcgctgcgacgttgatagtgaaccgtgccccggtaaaatgacgagcatcattcaggctgacaaaatgttcgatcaccgttgcttcggcaccttccgccagatccagatgatgtcggtaatgggcagtgttcacctcttcacctgccacgccctgggtgatatgcattaacagcaatggctttgccggccgttgaccgcgcttcacggcgatatgcgtcacgctttgtgccaggctttccgtcaaatgcagaaacacttccgcctgaatagcgtcgggtaaaccctgacggtcgtcgttaatgctcacttcatatccgctgccttcagttgcatcgctcagtgcgggcacgtaacgcccatcgacaaacaccagccgcacggagtctaacgttaacgctaaggcatcacgctgctgtggggatatctctcccgcaatgctgacaaactggctattgatcagcccttccagcggcgtatatttccagttttcatgtttacgtgtcggcagtccggtacgcagcaattgttgtaaatgctgctgtgcttgcggggagcgttttgtcccttcagcttcaaacaagtgatgccactgttgcagcgcgttactgctgttcggtaagccagccataaccctgctcctccagttgtttgaccaacgtgaaatcgccggatttcacaattcgtccctgatatagcacatgaacgtaatcaggcttgatgtagtcgagaatgcgttggtagtgcgtaacaatgatgaatgagcgcttgccatcacgcagcgagttcacgccatcggcgaccacttttaatgcgtcaatatccagcccggagtccgactcatcaagaatgcataactccggttccagcaccgccatttgcaaaatatcgttgcgctttttctcgccgccggaaaaaccaacgtttaccgaacgggttaataaatcttccggcatcttcaggagagcgattttctcttccatcaaatcctgaaaatcaaagcggtcgagcgtttcctggccgcgatagctgcgcaccgcattaagtgccgtttgcaggaaaaactggttactgacacctggaatctccaccggatactggaaggccataaagatgccttcgcccgcgcgatcttccggcgacagcgcaagcaaatctttgcctttgaactcaaccgtgccgcccgtcacttcataatcttctcgcccggcaagcgttgccgataaggtacttttgcccgaaccgtttggccccataatggcgtgaacttcgccgggatgaacgtcgaggcttaatccgcgcaggatagctttatcttccacgctgacgtgtaaatctttaatacttaacatgtttattccttatccgacgctgtgttcaagactgatggcgaggagtttttgtgcttcaacggcaaattccaacggcagctccgagaacacgtctttgcagaaaccgttaacaatcatcgagatggcgtcttcttcgctgatcccgcgttgcaggcagtaaaacagttgatcttcaccaatacgtgatgtcgttgcctcgtgttccagttgcgcactattgttacgacactcaacatacgggaaggtatgcgccccacaattagcgccaatcagcattgagtcgcactgagtgaaattgcgcgcattggttgccgtcggcatgattttcactaagccgcgataactgttctgactatgtccggcagagatccctttcgagataatggtcgatttggtgtttttaccgatgtggatcatcttggtgccggtatccgcttgctgatgaccgctggtcagcgccactgagtaaaactcaccaatggagttatcgccgcgcaaaatgcagctgggatatttccacgtaatcgctgacccggtttctgattgcgtccatgacattttgctgttttcgccttcgcacaaagcacgcttggtgacgaagttgagaataccgccggtgttgttatcgccaggaaaccagttttgtaccgtggaatatttcacctcggcgtttttatggatgatgacttccaccactgccgcgtgtaactgatagctgtcacgcaccggagcggaacagccttcaatgtagctgacgtagctgtcttcgtcggccaccagaatggtgcgctcaaactgcccggttttttctgcgttaatgcgaaaataggtggaaagttccatcgggcagcgcacgcctttaggcacataaataaacgtaccatcagaggctaccgccgcattaagcgcggcaaagaagttgtcattccccggcaccacggtgccgagatatttacgcaccagttccgggtgatcgtggatcgcctcaccaaaggaacagaaaataattccctgctccgccagtttttcgcgataagtagtggcaaccgaaactgagtcgaaaatggcatccaccgccacctctttgccttcccgcacgggaacgcccaactgctcaaacgccgcctccacctctttacttaaaaaggcgttcgcgccagtttgctgcaccgcgccaggttcagacgcgcaagtgtcgtcacaattaccgcacgatggtgctgagtagtagctgtaatcctgataattcagcttgtcgtagtgcgctttcaaccagtgcggttcttccatctccagccatgcgcgataggcgtttagacgaaactccagcatccactccggctcattacgcttcgccgaaattgcgcgcaccacctcttcgtttatcccctttgccagctcatcggtggctaactgggtgaagaatccttctttataattcagcgggccgccggtccaggttttgacatcgtcagttgcttcagtattacgagacatagtaccgcctataccccaaagctttcgccacagccacattcattctgggctttagggttgtgaaatttgaatatctgattaagtccttcacgaacgaaatcgacttccgtgccatcaataaacggcatcgcttgcagcgggacaaacagcttcgcgccgtcgtgttcaaacagcagatcgtctttgtccggctcgctaacactgtcgagcacatagccaaagcccgcgcagcccgtttgcttcacgcctaagcgcacgccgaccatacccggctgctttgccaccagctcacggatgtgtatcgccgctgcgggtgtcagcgttaagccttgccaggcgaaatcttgtgggttaaaggttcctgaatgcatgtccatcgatttacctcacttcatcgctttcagcgtataacagcatgttagtgataatgattatcagttcaacccagcaaacgcaggggctttaccgtaaaacatgctttttgcctgcttttaataagcatagaccctgatgtgtgggttaacaggcacgctaagaattaggtatctcattgttagataatggttattatctaaggagcattaaggctgtgatgaaaaagaaaaagttgtattgaaaatgactatttaagagataggtaaaaaagtgcagcgttcagaaataagaaaacccttaagtctgtgcgacacaggcttaagggtttctaccccatccggcgcttatctccggcactctcagtggcttagctcttgaaggggcgataagaataatctcataaagctaacccgccgttttaacacaaactgcgattagtattatttttgaacaatatcaggcggtagataagcagtattaagaaggtcatcgaacctggacggaggttaatccaggtcgatttggcgaacttgcggcattaagtcaggatcaatgcacgcccagacgccaggcaaagtagatttcttcttttaattcagcagaagagagagtaagcaggtcagcaaattcaagttctagttgtttcagacgtttgagatattgggcaggtgaaagattgctctggtcacggcgtaaaaattcaatggccagctgggtgggatcaagttgagtagacatagcatcctcgcttttagacaagacctgcacagtataccaccgtttactgtgcagataatgaccaaaagcaatatgcgtcacacttttctggtgacaacgtcacaaaatggcggtcgtcaatcgtgacgaacagcacaaacgccctttctcatcgaagatttcaatctgccagacctggtgacgcgaaccgagatgcaacggtttgcatacgccgcgcacccgcccttctcgtgccgagcggacgtggttagcattgatttccagaccaaccactttttgctcaccttcggtacataaataaccggcaacggaaccgatactttcggccagtaccacggatgctcctccatgcagcaacccgaaaggctgctttgtccgcgagtctactggcattgtcgcttcaagggtgtcatcaccaatatgttcaaagcgaatatccaggaaccccaccatgtttccttcacccatagcattcagtgcttccagggtgattttccgtttccatatcatttaataatctccagtaaagcctgcacaggatggcgtacccccgtgccttcaacccgttttacctggctacggcaggaatatccggtcgccagacagcggttacgcggcagtcgctgcatagcctgatgccaggataactcatagatcccgagcgaattttcatggtttttcgcttcatgtccgtaagtccctgccatgccgcagcaacccacgctgacattttccagtttcgcgccaaaacgggcaaatatcgcggcccattgtgctggcgcacccggcaaggcggtaacttcggtacagtgaccaaagaaataccatgattcaccgctgactgtagccactggctgtgactcaagtgcgcttgccagccattcattcgccagtaagacgttaaactcgccacgctcctcgcccagcgccagtttatattcatcgcgataacaaagtaccagcgccggatcgacgcccaccattggcatacccagcttcgccatacggttgaggaaatccgccgtctttttcgccgtcttcgcaaaacgattaagaaaacctttaatatgctgggctttgccatttggcgaaaatggcagtaacacaggctggaaacctaatttttcgaccagacggacaaaatccgccaccacttgcgcatcgtaatagctggtaaaggggtcctgcaccaccaacactgtgcgcgctttctgctctgcattgagagattcaagctgttccagcgtcatgtttgccgagcgatgccccaccatttgttgttgtagcgaggggaccgacagcagcggcaaatcaaccatgccgatatgtttttccgagagtttgcgcaccagcggctggttaatgaagaagttaaaggttttcggcgcgcgtgccatcagcggcgcgtagctctcgaccgtagcgacgaggtggtcgcgcagcgggcgtaaataacgggtgtgatagagctgcagaaaacgagagcgaaactccggcacatcaattttgatggggcactgggtcgaacacgctttacaggccagacagcccgacatcgcctctttgacttcgtgtgagaagtcatattcgcctttattcgcatgccagctattgcgcgtgcgggcaattaacgtccgcaaactgacgccggattcaggcagttcttgttccagtttgagtggatcaacgccgcgatccgccaacaaacgcagccattcacgcaccagcgttgcgcgccctttcggtgaatgaatccggttctgggtgatcttcatcgacggacacatcggactacgggcatcaaagttgaagcataaaccgttgccgttacactccatcgcaccgcgccactgctggcgtaccgcaatggggatctgccgatcgaatgtaccgcgcttcaccgcgtccactttcatcatcggcgcatcgagaccttctggcgggcaaatcttccctgggttgagtcggttatgcgggtcaaatgccgctttcactttgcgcagttctgcaaaaagttcctcaccgaaaaacgccgggctgtattcagcgcgaaaacctttgccgtgctcgccccacaacaaaccaccgtatttcgcagtcagcgccaccacgtcatcagagatttgcttcatcaaaatctcttgttgaggatcgcacatatccagcgctggacggacgtgcaagacacctgcgtcgacgtgaccgaacataccgtagcttaagccgtggctgtcgagcagcgcgcgaaattcagcaatataatccgccaggtgttccggcggtacgcaggtatcctcagcaaacggaattggcttagcggcacctttggcattgccaagcagaccaacggcttttttgcgcattgcatagatacgttcaacccccgccagctcacggcacacctgccagccgatgacacctgcttgatgactggcgatcagctcatccaaccgcgcacagagtgcatttacccgctcatcaatcagcgcctcatcatcaccagcaaattccacaatgttcagcccgagcatctcttggtcaggcacatcggtaatcaactcgctgacggaatgccagacaatatcttcccgcgccagattcagcacttttgagtccaccgtctctaccgaaagcgcccgcgcctcaaccataaacggcgcgttacgcagcgcagagtcaaaagagtcatatttgacgttcaccagacggcgcactttaggcaagcgtgtaatatccagccgcgcttcggtaataaaggccagcgtcccttctgaacccgtcagaatgcgcgtcaggtcgaactcggtcatctcatcgttaaagacatgacgcagatcgtaaccggtaagaaagcggttaagtttggggaagttgtcgataattaactggcgttgctgacggcaacgttgataaaccgtgttataaattcgcccgattgtggtattggatttacccagcgtttccgccaattcgacgggtaaaggttgcgtatcgagaatatcgccccccaacaacaccgcgcgtacgccaagtacgtgatctgacgttttgccatagaccagcgatccctgaccggatgcatcggtattgatcatcccaccgagcgttgcccggttgctggtcgaaagttccggcgcaaaaaagtagccgaacggtttcaggtactgattgagttgatcttttatcaccccggcctcaacgcgcacccagccctcttcagggttaatttcgatgatgcggttcatatggcgggacatatcaacaataatcccctggttgagcgcctgaccgttagtgccggtgccgccgccgcggggggtaaagatcagcgatgaatagcgttcctgcgcggcaagacgggcgatcagcgccacatctgcggttgaacgcggaaataccaccgcatcggggagaagttggtaaatactgttgtcggtcgacattgtcagacgatcggcataacttgtcgccgtatcgccggtaaaaccttgttgctccagctcttgcaaaaaattaagcaccagttgaacgacgccgggtgcctgggaaatctgtggaatcattatattgaccctttcctgcggtctgtgatgtaggtcgatacactattctttcaggctgctgcaatagcgcactgaaaggtgatgtttgtttactctatggatttcgtgttgcaggaaggcggcaagcgagtgaactccaggagcttacaatagtaagtgactggggtgaacgaacgtagccgcagcacatgcaacttgaaatacgacgagtaaatcgtttgcgtgttgcctgagttgttgtaccacatttttttctaacacgcccatcagaattaagggcagaatcggcctgttaaaaaccgctgaaattgctcatcattatgcaggtgagtttcgcgtgttcacgtcgcgtcgacgatttgacgcacaaaaaaggtgaaaagtagttatggtaaatgttcgtcagcccagggatgtcgcacaaattctgctttcggtgctgtttttagccatcatgattgtggcatgtctgtggattgttcaaccctttattctcggctttgcatgggccggtacggtggttatcgccacctggccggtattgttacgtttgcaaaagatcatgtttggccgccgctctctcgccgttctggtgatgacgctgttattagtgatggtgtttatcatccctattgctttgctggttaacagtatcgtcgacggcagcggcccgctaattaaagccatttccagcggtgacatgacgttacccgatctggcgtggcttaataccattccggtgattggcgcgaagctgtatgcaggctggcacaacttgctggatatgggggggacggcgatcatggcgaaagtccgcccttatattggcaccaccaccacctggttcgttgggcaggcggcgcatatcgggcgctttatggtgcattgtgcgctgatgcttctcttcagtgccctgctgtactggcgcggtgaacaggtggcacaaggcattcgccattttgcaacccgtctggcaggcgttcgcggagatgccgccgtgctgctggcggcacaggctatccgcgcggtggcgctgggtgtggtggtgacggcgttagtacaggcagtgcttggcggtatcggcctcgccgtatccggcgtaccttatgcaacgttgctaacggtgttaatgatcctctcctgccttgtccagcttggcccgttgccggtactgattccggcgattatctggctctactggactggcgataccacctggggaacggtattgttagtgtggagcggtgtggttggcacgctggataacgtcatccgcccaatgttaattcgcatgggtgccgatttaccgctgatcctgattctctctggcgttattggtggtttgattgctttcgggatgatcggtctgtttattggtccggttctgttagccgtttcctggcgtctgtttgccgcgtgggtggaagaagtcccgccgccgacggaccaaccggaagaaattctcgaagaacttggcgaaatcgagaaaccgaataagtaatttctcatcaggcggctctgccgcctgattgttaaccaccgctaattgatatttgcttgctcttccccatattttcctgcttaccgccattcagctggtagtacctgtcgcaaattctttacagtttttaaactaatgagacgaatctgatcgacgcaaaaagtccgtatgcctactattagctcacggttataaatcaacatattgatttataagcatggaaatcccctgagtgaaacaacgaattgctgtgtgtagtctttgcccatctcccacgatgggcttttttttaacatttttccgcttcgctacctcgcccctcactctttccaataatgttgcacaagatactgtgactctcttcaagccgtcagcaggctgataatgttatttatattttattgtttatttcatgcagccattacacgatgaacgcttatgaactccaggcactccgccatatttttgccatgactattgatgaatgcgcgacctggattgcccagaccggtgacagtgaaagctggcgtcagtgggaaaatggcaagtgtgccattcctgatcgtgtagtcgagcaactgttggctatgcgtcagcaaagaaaaaaacatcttcatgccatcatagagaaaataaataaccgcatcggcaacaacaccatgcgttttttccccgacttaaccgcatttcaacgagtctaccctgatggcaattttattgactggaagatctatcaatcggtagctgctgaattatatgcacacgatctggagcggctttgttaatttttccacagaaaggaattgtcgttgttacaacaataatgaacggatgctgacacaacatcgcttcactttttaaagcacctttgctaagtagaacctatgaaaaatccctatttccctaccgcacttgggttgtattttaattacctggtgcatggtatgggcgtccttttgatgagcctgaatatggcctcgctggagacactttggcagactaatgccgcgggtgtctcgatagttatctcatcgctgggcattggtcgattaagtgtcttgctttttgcaggattattatccgatcgctttggtcgccgcccttttatcatgctcgggatgtgctgctatatggccttcttttttggcatcctgcagaccaataacatcattatcgcttatgtttttggctttctggcgggaatggcaaacagttttctcgatgcaggcacttatcccagtttgatggaagcttttccacgctcacctgggacagccaatattttaattaaagcatttgtttccagcggacaatttttattaccgctaatcattagcctgttagtgtgggctgaactgtggttcggttggtcctttatgattgctgcaggcattatgtttattaacgctctgtttttataccgttgtacgttcccaccccatccgggtcgtcgcttacctgtcataaagaaaaccaccagctctacggaacatcgctgttcaattatcgatttagccagttataccttatatggctatatctcaatggcaacgttttatctggttagccagtggctggcacagtacggacaatttgttgcaggcatgtcatacactatgtcgatcaaactactcagtatctacaccgtgggttcgctgctttgtgtatttattaccgctccactcattcgtaataccgttcgcccaacaacattactgatgctgtacacctttatctcatttattgctctgtttaccgtctgcctgcatcccacattttatgtggtgataatatttgcttttgtcattggttttacctctgctggaggtgttgtgcaaattggcctgacgttaatggctgaacgtttcccttacgctaaaggtaaagctacagggatctattacagtgcgggcagtattgcgacctttactattccgttgattacggctcatctgtcccaaagaagtattgccgatattatgtggttcgataccgccatcgctgccatcggttttttactggcactgtttatcggcttacgcagccgcaaaaaaacgcggcatcactcgctaaaggaaaatgtcgctccgggtgggtaatgcaatattcttttcaggtcatgcaagatcttacggataaataactctttctgcgctaactaaggaaaatcgcgatcaaaaacaaactatgacatgcaatattcctggaaacataaactttatgccatgtacccagggaaaatcatcttcagtatagtaattatgtaaaccgtcggagaacaatacgtacggtaacgaaattatctttcagcaaggagctgtgaaaatgtctcaaaataaggctttcagcacgccatttatcctggctgttctttgtatttacttcagctacttcctgcacggcattagtgttattacgcttgcccaaaatatgtcatctctggcggaaaagttttccactgacaacgcgggcattgcctacttaatttccggtatcggtttggggcgattgatcagtattttattcttcggtgtgatctccgataagtttggtcgtcgggcggtgatattaatggcagtaataatgtatctgctattcttctttggtattcccgcttgcccgaatttaactctcgcctacggtctggcagtgtgcgtaggtatcgctaactcagcgctggatacgggtggctaccccgcgctcatggaatgctttccgaaagcctctggttcggcggtcatactggttaaagcgatggtgtcatttgggcaaatgttctacccaatgctggtgagctatatgttgctcaataatatctggtacggctatgggctgattattccgggtattctatttgtactgatcacgctgatgctgttgaaaagcaaattccccagccagttggtggacgccagcgtaactaatgaattaccgcaaatgaacagcaaaccgttagtctggctggaaggtgtttcatcggtactgttcggtgtagccgcattctcgaccttttatgtgattgtggtgtggatgcccaaatatgcgatggcttttgctggtatgtcagaagctgaggcattaaaaaccatctcttattacagtatgggctcgttggtctgtgtctttatttttgccgcactactgaaaaaaatggtccggcccatctgggctaatgtatttaactctgcactggcaacaataacagcagccattatctacctgtacccttctccactggtgtgcaatgccggagcctttgttatcggtttctcagcagctggcggcattttacagctcggcgtttcggtcatgtcagagttttttcccaaaagcaaagccaaagtcaccagtatttatatgatgatgggtggactggctaactttgttattccactgattaccggttatctgtcgaacatcggcctgcaatatatcattgttctcgattttactttcgcgctgctggccctgattaccgcaattattgtttttatccgctattaccgcgttttcattattcctgaaaatgatgtgcggtttggcgagcgtaaattttgcacccggttaaacacaattaagcatagaggttaaaggagttaattatggatgttaccgcaaaatacgaattgattgggttgatggcctatcctatccgccacagtttatcgcccgaaatgcagaataaagccttagaaaaagcgggattgccatttacctatatggccttcgaagtggataacgatagctttcctggagcaattgaaggattaaaagccctcaaaatgcgcggaactggtgtatcgatgccgaacaaacaactggcgtgtgaatatgttgatgaattaacaccagctgccaaactggtgggggccatcaacaccatcgttaatgatgatggctatctgcgtggctataacaccgacggcacgggccatattcgcgccattaaagagagcggttttgatatcaaaggcaaaacgatggtgctgttaggggccggtggtgcctcaacggcaattggcgcgcagggggcaattgaaggtttaaaagaaattaaactctttaaccgtcgggatgagttcttcgataaagccctcgccttcgcgcagcgggttaatgaaaacaccgattgtgtcgtcacggtcaccgatctcgccgatcagcaagcctttgctgaagccctggcttccgccgacattttaaccaatggcacaaaagtgggtatgaaaccccttgagaatgaatcattggttaatgatatcagtctgttacatccgggacttctggtcactgaatgcgtgtataacccgcatatgacgaagttattgcagcaggcgcaacaagctggttgcaaaacgattgatggatacggcatgttgttgtggcaaggggctgaacagttcacattatggactggcaaagatttccctctggaatatgttaaacaggtcatggggttcggtgcctgacaggctgaccgcgtgcagaaagggtaaaaaatgaaaaccgtaactgtaaaagatctcgtcattggtacgggcgcacctaaaatcatcgtctcgctgatggcgaaagatatcgccagcgtgaaatccgaagctctcgcctatcgtgaagcggactttgatattctggaatggcgtgtggaccactatgccgacctctccaatgtggagtctgtcatggcggcagcaaaaattctccgtgagaccatgccagaaaaaccgctgctgtttaccttccgcagtgccaaagaaggcggcgagcaggcgatttccaccgaggcttatattgcactcaatcgtgcagccatcgacagcggcctggttgatatgatcgatctggagttatttaccggtgatgatcaggttaaagaaaccgtcgcctacgcccacgcgcatgatgtgaaagtagtcatgtccaaccatgacttccataaaacgccggaagccgaagaaatcattgcccgtctgcgcaaaatgcaatccttcgacgccgatattcctaagattgcgctgatgccgcaaagtaccagcgatgtgctgacgttgcttgccgcgaccctggagatgcaggagcagtatgccgatcgtccaattatcacgatgtcgatggcaaaaactggcgtaatttctcgtctggctggtgaagtatttggctcggcggcaacttttggtgcggtaaaaaaagcgtctgcgccagggcaaatctcggtaaatgatttgcgcacggtattaactattttacaccaggcataagcaataatatttcggcgggaacaccctccccgccgaactaaaaaatatattcaatcgtatttaataaaaatatttcgtgagtctctgtgcgctaattctccatttggcgtagggaaaatcacatctgaatcaggaattaacaatgaaacctgtaaaaccacctcgtattaatggacgagtgccggtcctgtcggcacaggaagcggtgaattatattcccgacgaagcaacactttgtgtgttaggcgctggcggcggtattctggaagccaccacgttaattactgctcttgctgataaatataaacagactcaaacaccacgtaatttatcgattattagtccaacagggcttggcgatcgcgccgaccgtggtattagtcctctggcgcaagaaggtctggtgaaatgggcattatgtggtcactggggacaatcgccgcgtatttctgaactcgcagaacaaaataaaattattgcttataactacccacaaggtgtacttacacaaaccttacgcgccgccgcagcccaccagcctggtattattagtgatattggcatcgggacatttgtcgatccacgccagcaaggcggcaaactgaatgaagtcactaaagaagacctgattaaactggtcgagtttgataacaaagaatatctctattacaaagcgattgcgccagatattgccttcattcgcgctaccacctgcgacagtgaaggctacgccacttttgaagatgaggtgatgtatctcgacgcattggttattgcccaggcggtgcacaataacggcggtattgtgatgatgcaggtgcagaaaatggttaagaaagccacgctgcatcctaaatctgtccgtattccgggttatctggtggatattgtggtggtcgatccggatcaaacccaactgtatggcggtgcaccggttaaccgctttatttctggtgacttcacccttgatgacagtaccaaacttagcctgcccctaaaccaacgtaaattagttgcgcggcgcgcattattcgaaatgcgtaaaggcgcggtggggaatgtcggcgtcggtattgctgacggcattggcctggtcgcccgagaagaaggttgtgctgatgactttattctgacggtagaaacaggtccgattggcggaattacttcacaggggatcgcctttggcgcgaacgtgaatacccgtgccattctggatatgacgtcccagtttgatttttatcacggtggcggtctggatgtttgttatttgtgttttgctgaagtcgaccagcacggtaacgtcggcgtgcataaattcaatggtaaaatcatgggcaccggtggatttattgatatcagtgccacttcgaagaaaatcattttctgcggcacattaactgcgggcagtttaaaaacagaaattaccgacggcaaattaaatatcgtccaggaaggacgggtgaagaaatttattcgggaactaccggaaattactttcagcggaaaaatcgctctcgagcgagggctggatgttcgttatatcactgagcgcgcagtattcacgctgaaagaagacggcctgcatttaatcgaaatcgcccctggcgtcgatttacaaaaagatattctcgacaaaatggatttcaccccagtgatttcgccagaactcaaactgatggacgaaagattatttatcgatgcggcgatgggttttgtcctgcctgaagcggctcattaacaggagtataatgatggatttttctttaactgaagaacaagaactgctgctggccagtattcgcgaactgattacgactaactttccggaagagtatttccgcacctgcgatcaaaacgggacatatccgcgtgagtttatgcgggcgctggcggataacggtatttccatgcttggcgtgccggaagaatttggtggtatccctgcggattacgtcacccaaatgctggcgctgatggaagtgtcaaaatgcggtgctccggcatttttaattaccaacggtcaatgtattcacagtatgcgccgtttcggttctgcagagcagctacgtaaaacggcagagagcaccctggaaacgggtgatcccgcctatgccctggcgttgacggaaccaggtgctggctcagataacaacagtgccactaccacttacacgcgtaaaaacggcaaggtctacatcaacggacaaaaaacctttattaccggtgcgaaagagtacccgtatatgctggtgctggcgcgcgatccgcaaccgaaagatcccaaaaaagccttcaccctgtggtgggtcgactccagtaagcccggcattaagattaacccgctgcataaaatcggctggcatatgctcagcacctgcgaagtctatctcgacaacgtggaggttgaagagagcgacatggtgggcgaagaaggaatgggtttcctcaatgtgatgtacaactttgagatggagcgcctgatcaacgccgcgcgcagcaccggctttgccgaatgcgcctttgaagatgccgcccgctatgccaaccaacgtatcgcttttggtaagcccattggtcataaccagatgatccaggaaaaactggcgctgatggcgattaagatcgacaacatgcgcaacatggtgctgaaagtggcatggcaagccgatcagcatcagtcactgcgcaccagcgcggcgctggcaaaactgtactgtgcacgtaccgcaatggaagtcattgatgatgcgattcaaatcatgggcggtctgggctataccgatgaggcgcgcgtctcccgcttctggcgtgatgtccgttgtgaacgtatcggcggcggtacagacgaaattatgatttacgtagcaggtcggcagatcctgaaagactatcagaacaaataatctgcaggcggcgcagcttcttaacaaactgcgccgccagatttatccaacaagacttaccggttgaggaaattcagataggatttcttgttccgcaaaacagtttttaaattgtctacggtaatcgctgggcgaacaaccgacatggcgcaaaaacagtttggcaaagtgatcgacattttcataacccacacgccaggagatctctgcctgtgataattcagtattagtgagtgaccattttgcttccgtcatacgccgttgaataacatagttaataggggaaatacgatactctttggtaaattcatggcaaatataactgacgctggcacgaaattttttcgataactgttctaaagtgattttttcgcgataattattattcagatagaaaagaatatcttttatcagaacatcttttttaatatacccctgctccgaacgataagcatttttaaaattttcgtagtaaagaatggctaacgtataggcaaatgcatcccataacgaagatgtttggctatttttactttgcggcaaaatcacacttagctcattaaataaggtttttatgacttcttttccctgccccgcggcaattaccggacaagaatgcggttgcagtagctgattttcctcagccccctgaaactgaaagccgtacagcgcacaggtacacgtcgttgccggatcgttaacgtcagaggccaccgcatgcagcctgccgcgttctatcaccacaatgtcatccgcatgtgcgacatataacgaagaatcgatggtaaaccttgcaacccctttcttgacgtaaatcaactcggtttcattgtcatgaacgtgatgtccggactcccattttggatcatcgctaaatgcaaaacgtgaaagccgtggcgttttaccggcgacaaacagcgtttcactggcgttatcaaaacagcgttgatacatgacaacctccctattccatgagcaagcaaaaacaatatatgccggataaaatacggcgtgtattgcggttatacaaccgcgtttagcgagagctaaacaagattatttacactgaatgcaagattgtacggtcatggaataactatattgccgcaaattgcacttttgttttagcgatcgcattttttttgcaagattgttggcaaggaaaacagcttgctccgtcgaaaaccccgcaccgctatcgcacactattttcaggccatttttaccttccatcggagatggttccgtatgcgactcacaggagaaatcatgaaaataataacctgctttaagctggtgcctgaagaacaggacattgttgtcactccagaatacaccctgaatttcgacaatgccgacgccaaaatcagccagttcgatctcaatgccattgaagctgcaagccagctcgcaacagatgacgatgagatagccgcgctgaccgttggcggctcattgttgcagaactcgaaagtgcgcaaagacgtgctatcccgcgggccgcacagcctgtatttggtgcaggatgcgcaacttgaacatgcactgcctctcgataccgcaaaagcgctggcggcagcaattgaaaagatcggcttcgatttactgatctttggtgaaggttccggcgacctttatgcccagcaggttggcttgctggtcggagaaattctgcaacttccggtgattaatgcagtgagtgctattcagcgtcagggcaatacactggtgattgaacgcacgcttgaagatgatgttgaagttattgaactctctgttccagccgtgctctgcgtcacctccgatattaacgtgccacgcattccttcgatgaaagccattctcggcgcgggtaaaaaaccggtaaatcagtggcaggcaagtgatattgactggagccagagcgcgccacttgctgaactggtcggcattcgcgtaccgccgcaaacagaacgtaagcacatcattatcgataacgattcgccggaggccattgccgagctggcggaacatctgaagaaagccctgaactgaagcctacggagaagaaacgatgagtcaattaaacagcgtctgggtctttagcgataatcctgaacgttatgctgaactgtttggcggcgctcagcaatggggccaacaggtgtatgccattgtacaaaataccgaccaggcgcaggcagttatgccttatggtccaaaatgtctttatgttcttgcgcaaaacgacgcgctgcaacgcactgaaaattacgccgaaagcattgctgccctgctgaaagataaacaccccgctatgttgctgttggccgcgacgaaacgtggtaaagcgctggcagcacggttaagtgtgcaactgaatgcggcgctggtgaacgatgccacggcggtggatattgtcgatggtcacatttgcgccgaacaccggatgtatggcgggttagcgttcgctcaggaaaagatcaacagcccgctggcgatcattacccttgcacccggtgttcaggaaccgtgcaccagtgatacctctcatcagtgcccgacagaaacggtaccttatgttgctccgcgtcatgaaattctctgtcgcgaacgccgtgcgaaagccgcaagcagcgtggacctgagcaaagcaaaacgtgtggttggcgtcggtcgtggactggcggcgcaggatgacctaaaaatggtccacgaactggcggcggtgctgaatgctgaagtcggctgttcacgtccaattgccgaaggcgagaactggatggagcgtgaacgttatatcggtgtctccggcgtgttgctgaaatccgatctctacctgacgctggggatctccgggcagatccagcatatggttggcggcaacggcgcaaaagtgattgtcgccatcaataaagataaaaatgcgccaatcttcaactatgccgactacggtctggtgggcgatatctacaaagtcgtccctgccctgattagccagttgagccgctaattcccctttcaaccacatctcccgctgtaaacgcagcgggaagggagcataacgcatgtcggatgacaaatttgatgccattgtggtcggtgcgggcgttgctggtagcgttgccgcactggtcatggcacgagccgggctggatgtcctggtgatagaacgcggcgacagtgccggatgtaaaaacatgaccggcgggcgtctttatgcccacacacttgaagcaatcattccaggctttgcagtatcagcgccggtagaacgcaaggtcacacgcgagaaaatctccttcttaaccgaagaaagcgccgttaccctcgattttcaccgcgagcagccagatgttccgcaacacgcatcttataccgtattgcgtaatcgtctggacccgtggttgatggaacaagccgagcaggcgggcgcgcagtttatcccaggcgttcgcgtcgacgcgctggttcgtgaaggaaacaaggtcactggcgtgcaggctggggatgatattctcgaagcgaatgtggtgattctggctgatggcgttaactcgatgcttggccgctcgctgggaatggttcccgcttccgatccgcatcattacgctgttggtgttaaagaggttattggcctcacaccagaacagatcaacgatcgctttaatattacgggcgaggaaggtgccgcctggctgtttgccggttccccttctgacggcctgatgggcgggggatttctctataccaacaaggattccatatccttggggctggtttgtggattgggtgatatcgcccatgcgcaaaaaagcgtgccgcaaatgctggaagattttaaacaacaccccgccattcgcccgctgattagcggcggcaaactgcttgaatattccgcgcatatggtgccggaaggcggtctggcaatggtgccgcaactggttaacgagggcgtgatgatcgttggtgacgccgcaggcttctgcctgaatttgggttttacggtccgcggcatggatttagccattgcatcggctcaggctgccgccacaacggtgatcgccgccaaagaacgcgcggatttctccgccagcagtctggcgcaatacaaacgtgagctggaacaaagctgcgtcatgcgtgatatgcagcattttcgcaagatcccggcgctgatggaaaacccgcgcctgtttagccaatacccacgaatggtagccgacatcatgaacgagatgttcaccatcgacggcaaaccaaaccagccggtacgaaaaatgatcatgggacatgcgaagaaaattgggctgatcaacttgctgaaagatggcattaagggagcaaccgcgctatgagccagaacgctacggttaacgtcgacatcaaattaggcgtcaataaattccatgttgatgagggccacccgcatatcattctggcggaaaatcccgatatcaatgaattccataaattaatgaaagcctgccctgccggactttataagcaggatgacgcaggaaacattcattttgattccgccggttgtctggagtgcggcacctgtcgggtgctgtgcggtaacactattctcgaacagtggcaatatcccgcaggcaccttcggtattgattttcgctacggctaatcatgcatcccacaggcccgcatctcgggcctgatgttctgtttcgagagtccaacatgaaagtgacattaacgtttaacgaacaacgtcgtgcggcgtatcgtcagcaagggttatggggcgatgcttcgctggccgattactggcagcagaccgctcgtgcgatgccagacaaaattgccgtggtcgataatcatggtgcatcgtacacctatagcgcgctcgatcacgccgcgagctgtctggcaaactggatgttagcgaagggtattgaatcaggcgatcgcatcgcatttcaactgcctggctggtgtgaatttaccgttatctatcttgcctgcctgaaaatcggtgcagtttccgtgccgctgttgccttcctggcgggaagcagaactggtgtgggtgctcaataagtgtcaggcaaaaatgttctttgcaccgacgttgtttaaacaaacgcgtccggtagatttaatcctgccgctgcaaaatcagcttccacaactacaacaaattgtcggcgtggacaaactggctcccgccacctcttccctctcattaagtcagattatcgccgacaatacctcactgaccacggcgataacgacccacggcgatgaattagctgcggtgctgtttacctccggaaccgagggtctgccaaagggcgtgatgctaacgcataacaatattctcgccagtgagcgggcttattgcgcgcgactgaatctgacctggcaggatgtctttatgatgcctgcgccacttggtcacgcaacgggctttctgcatggcgtaacggcaccattcttaattggcgctcgcagcgtgttgttagatattttcactcctgatgcgtgtctcgcgctgcttgagcagcagcgttgcacctgtatgctcggcgcaacgccgtttgtctatgatcttttgaatgtactagagaaacaacccgcggacctttcagcgctgcgtttctttctttgcggcggaaccacaatccccaaaaaagtggcgcgtgaatgccagcagcgcggcattaaattattaagtgtttatggttccacagaaagttcgccgcatgcggtggtgaatctcgatgatcctttgtcgcgctttatgcacaccgatggttacgctgccgcaggtgtagagattaaagtggtcgatgacgcacgcaagaccttaccgccaggttgcgaaggtgaagaagcctcgcgtggccccaatgtgtttatggggtattttgatgaacctgaattaaccgcccgtgccctggatgaagaaggctggtattacagcggcgatctctgccgtatggatgaggctggctatataaaaattaccggacgcaaaaaagatattattgtccgcggcggcgaaaatattagcagccgtgaagtggaagatattttattgcagcatcctaaaattcacgatgcctgtgtggttgcaatgtccgatgaacgtttaggtgaacgatcatgcgcttatgtcgtgctgaaagcgccgcatcattcattatcgctggaagaggtagtggctttttttagccgtaaacgggtcgcaaaatataaatatcctgaacatatcgtggtaatcgaaaaactaccgcgaactacctcaggtaaaatacaaaagtttttgttaagaaaagatattatgcggcgtttaacgcaggatgtctgtgaagagattgaataagtttcatcttcggggatcacataaccccggcgactaaacgccgccggggatttattttatttcttcagttcagccaggcttaaccaggtttgcaccacggtgtccgggttcagagacaggctatcgatcccctcttccatcaaccatgcggcaaagtcttcgtggtcggacggaccctgaccgcaaatcccgacatatttgccctgtttcttcgcggcacggatagccatcgacagcagtgctttcaccgcatcgttgcgctcatcgaacaattcagacaccacgccggagtcacggtccagaccgagcgccagctgcgtcatatcgtttgagccaattgagaagccgtcgaaatattcgaggaactgctcggccagcaaggcgttggacgggatttcacacatcatgatgattttcagcccgttctcgccacgtttcagcccctgacgcgccagttcttcaaccaccgctttcgcctgatctacggtacgcacgaacgggatcatgatctcaacgttggtcagtcccatgtcgttgcgcacacgtttcactgcttcacactccagcgcgaaacagtcgcggaagctgtcggaaacatagcggcccgcgccacggaagccgagcatcgggttctcttcatctggctcgtaacgctcaccaccgaccaggttggcatattcgttcgatttaaaatcagagagacggacaatgacgcgcttcggataaaacgcggcacccagcgtcgcgatcccttcagtcagacgaccaacgtaaaattcacgcggagaatcaaaacctttcatcatctcgcggatttcgttttgcaactgcggttcctgatcgtcaaactcaagcagtgcgcgtgggtggacgccaatcatacggttgatgataaattccagacgcgcaaggcccacgccttcgttcggtaggcaggcgaagtcgaaagcacggtccgggttaccgacgttcatcatcactttcaacggcagatccggcatcgtttctacgctggagcttttcacgctaaattccagcaactccgcatagacgtaaccggtatcaccttcggcacaagaaacagtgacgttctcaccgtctttcatccgttctgttgcatctccacagcccactaccgccggaatgcccagttcacgagcgatgatcgccgcgtgacaggtacgaccgccacggttggtgacgatggcagatgctttcttcatgatcggttcccagtccgggtcggtcatgtcagtaaccagcacgtcgccaggttcgatgcggttcatttcgctgatgtcatggatgactttcaccggacccgcaccgatgcgatgaccgatagcacggccttcggcgataatcttaccctgtgaatgcagcgtataacgctccatgacctgaccgcgtgagcgcacggtttccggacgcgcctgcacaatgaacagtttaccggtgtggccatctttcgcccactcaatatccatcgggcgaccgtagtgtttctcaatttgtacggcctgttttgccagttcctgcacttcttcgttggtcagcgagaagatgtcacgctgttcctgcggtacgtcttcgattttaacctgcttgccgtgctcctgggtcggcgcgtaaaccatgcggatttttttcgaccccatggtgcggcgcacgatagccgggcgattcgccgccagtgtcggtttatgcacgtaaaactcatccgggttaaccgcaccctgcacgaccatctcaccaaggccccatgcggaagtgataaacaccacctggtcaaagccggattcggtatcaatggagaacatcacgccagatgatgcgaggtcagagcgcaccatccgttgaacaccggcggagagcgccacaccacggtgatcgtaaccctggtgcacacgataagagatggcgcgatcgttaaacagagaagcaaatacatgtttcactgccacgagaacggcgtcaaaaccctgaacgttgaggaaggtttcctgctgaccggcaaaagaagcgtccggcatatcttctgcggtggcggaggagcgcaccgcaaaagaggcgttttcgtcatcggcggaaagctgtgcataggcttcgcggatggcgttttccagctcaggctggaagggagtgtcgataatccactggcggatttgcgcgcccgctttcgcaagctgagtaacatcgtcaatatccgttttatccagcagttcataaatgcgctggtttacgccgctttggtccagaaactggttaaacgcgtcggcggttgtggcgaaaccattcggaacggaaacacccattccggaaagattagtaatcatttcacccagggaggcatttttgcccccaaccctgtctacatcattcatgccgagttggttataccaaagcaccagcggtgacgagccattgttggacatcgaacaatccttttgtgataaatgaacggtttgagaaacacatttctgcgcatttatctttgcatatttaaccggatgaaaaaaacggtgaatcgttcaagcaaatatatttttttactttttaagactgatcccagcgttgcgcaaatctgctctcttcgacaatttccacataaaccatcggtataaacgaaaccataaaaatgaaatgctgttttcataaaaaataaaattgaaggttcattttataaaccagacataacgttctacgcttctgtgcgtttttaatttatgctttcatagaattatgtctgcatcacgggaagaacaaaatggataatgctgttgatcgccacgttttttatatttctgatggtacggcaataactgcggaggtattaggacacgcagtaatgtcacaatttcccgtcactatcagcagcatcacgctgccgtttgtcgaaaatgagagccgtgcacgggcagtgaaggatcagattgacgcaatttatcaccagacaggcgtgcgcccgctggtcttctactccatcgtgttgccggagattcgcgccatcatcttgcaaagtgaaggcttttgccaggatatcgttcaggcgctggttgccccgctacaacaagagatgaaactggatccaacgccgattgctcatcgtacccatggccttaaccctaataatctcaataaatatgatgcgcgcattgcggcgattgattacaccctcgcccacgatgacggcatttcgttgcgcaatctggaccaggctcaggtgatcctgctcggtgtttctcgctgtggtaaaacccccaccagtctgtatctggcaatgcagtttggtatccgcgcggcaaactacccctttattgccgacgatatggataatctggtgctacccgcgtcgctcaaaccgcttcagcataaattgttcggcctgactatcgacccggaacgtctggcggcgattcgcgaggaacgtcgggagaacagtcgctatgcctcgcttcgtcagtgcaggatggaagtcgcggaagtggaagccttgtaccgtaaaaatcagatcccgtggattaacagtaccaattattcggtagaagagattgccaccaagatcctcgatatcatgggccttagtcgccgaatgtactagagaactagtgcattagcttatttttttgttatcatgctaaccacccggcgaggtgtgacacacctcgcacttgaaatcagcagcgattggtttatcgtgatgcgcatcacttcccggcagtcctgccgtagaagcaacaaatttctgagacttgtaatgaacagaactgacgaactccgtactgcgcgtattgagagcctggtaacgcccgccgaactcgcgctacggtatcccgtaacgcctggcgtcgccacccatgtcaccgactcccgccgcagaattgaaaaaatactgaatggtgaagataagcgactgttggtcattattggcccctgctcgatccacgatctcaccgctgcaatggagtacgccacccgtctgcagtcgctgcgcaaccagtaccagtcacggctggaaatcgtaatgcgcacctattttgaaaaaccacgaactgttgtcggctggaaaggactaatctccgatccagatttaaacggcagctatcgggtaaatcacggtctggagctggcgcgcaaattacttttacaggtaaatgagctgggcgtcccaaccgcgaccgagttcctcgatatggtgaccggtcagtttattgctgatttaatcagttggggcgcgattggcgcacgtactaccgaaagtcagatccaccgcgaaatggcttcggcactctcctgtccggtaggttttaaaaatggtaccgatggcaatacgcggattgctgtggatgctatccgcgcagcccgcgccagccatatgttcctctcgccagacaaaaatggtcagatgaccatctatcagaccagcggcaacccgtatggccacattattatgcgtggcggcaaaaaaccgaattatcatgccgatgatatcgccgcagcctgcgatacgctgcacgagtttgatttacctgaacatctggtggtggatttcagccacggtaactgccagaagcagcaccgtcgccagttagaagtttgtgaggatatttgtcagcaaatccgcaatggctctacggcgattgctggaattatggcggaaagtttcctgcgcgaaggaacgcaaaaaatcgtcggcagtcagccgctcacttacggtcaatccattaccgacccgtgtctgggctgggaggataccgaacgcctggtcgaaaaactcgcctctgcggtagatacccgcttctgaatgcgtgcccattcctgacggaatgggcatttctgcgcaacttgttgtcttctcaacaaattactgcttgctctggtcagccataatattgataataagaatcattgttatatcaattattattaatttttatgcgttatacggatagcagaaaactcacgcctgaaacggatgccaatcacaagaccgcttccccgcagcctattcggcgaatttccagccagacactgttaggtccggatggcaaactgattatcgatcatgacgggcaagaatatctgctccgtaaaactcaggctggcaagctgctgttgaccaagtagcctttaactcgagcagctgacttccagccgtttaccccagtcaggtggacgactgacatagtcatcatctctgtcgctgaaaggatttcgcaacgcctcatgcaggcggtgcaattccgtcatatcacccttttctgccgcttcaatcgcccgttgcgccaaccagttgcgcaataccagagcggggttaacgctttgcatcagttgctgacgctcactatcgctaacctcgtcttgttgcaaacgcccccgataacgggcaaaccagtcatcaaatgccgcacgatcaataaactcatcacgtagcggtgacgccgcgctgtgctgctcggtcagactcagcatgcggaatgtgcgggtataatcgctgcgctctcgcgccatcagactgaataattcattcagtagcgcgttatcctctttttgctccgtcatgaagcccagtttctgccgcatccgttctccataatgcgtcaacaaaacctgctgatagctgtccagggcctcattcagggcatctacggcaacaaatggcgacaatgtctgcgccagacgctgtaaattccacaacgcgacggcaggttgattatcaaagctgtaacgcccttgatgatccgagtgattacaaataaaaccgggttcgtaatcatcaagaaaaccaaacggcccgtaatcaagcgtcagccccagcagcgacatgttgtcggtattcatcaccccatgagcaaagccgaccgtctgccattgggcaattaacgacgcggtacgtgcgacaacatcgctaaaccagagacggtatttgtcctcatcatctgcaagatgtgaccagtaatgacgaatagcaaagtcagctaactgacgaaccttttccgactcgcggcggtagtaaaaatgttcgaaatgaccaaagcgcagatgacttggtgccacacgcatcagcatcgcgcctggctccgccgtttcccgatacactggcgaatcgctggtgacgatacttaacgcgcgggtcgtcggaatgcccagataatgcatcgcctcactggcgagactttctcgtatcgtcgaacgtaaaaccgcccgtccatcacccattcgcgaataaggcgtcaggccagcacctttcagatgccagtccattgtagtgccatcagcaagcagttgttcgccgagtaaaatgccgcgcccatcacccagttggcccgcccagacgccgaactgatgaccactgtaaacctgcgccagtggtgacataccaggcagtagggcttcgccgccccagacacctgcgccatttttaaacagcgacgatggaatactcagcgtgttagccagttcggtattatgccaaatcagccgggcattatttaaaggcgtaggggaaagtgctgtataggtttctggcaattcatcgcgccagcgggtaacaaaagacagggtcatagatcctcctgtttgatagtgtagacggttactctcgtcttaaacaccagcaaacagaagggttatcgctgaaccaacgtcgttatctgatttatgggaacggcaggccacaggcatccctggagagcatggaaatcgaagggggtaatctgtgccaatatttctgccgtatcaatgcctcccgcaatgatgcaattgcaacaaggggaaatttgcgcctggatcgcacgaataaacggttcgaaggagcggtgcgtgatttgttgctgaataaaacttttatccagcatgacgcgggtgaaaagaccatcaaaaaccgctttcattgtgctattgcctgctcccaaattacctaacacaaggggatacacttgcgataaggataaaagaccgcgattatcttttccttcattgagatgcgggtaattctcattaatcaacagttcaataaacggatattttaatagttcgcctgcgtaattatccctctctaataataatgtagccacttgtggcgttaaattaagccaggcaaagagtttatgttgaataaaaaaatgttggcatgattttagtaattccaactgctctgaaaataattgccaatgttgctcctcggtaagttgcgctataacccgactcgtcgggatacgaaccgtaccatcttcactggagaaatgggtaattaactcaacgccgacaaggacttgctggttgtctcttatcggcaggaaatagcaatcagaatgataaagattctccaaaaaaatcttcatggtaaccgtccctctcgaaggatgtttttcagtatccggctaaaagggatgaggccataagacataacaattacagaaggagtaactttcatttgttccatgttaaccactttttcaggggtcctttttttagattatcctgattataaacgaataatccatttacggaatttttgtctgcaaaatactactgtattcaggagtaaatggacggcgatgtatcatcgccgtccatttttcgacatactagattcgtctcgcctgccagaaatttttctgccaatagacattatcaagtgaggaacgcatcactcccttgctggtagaggcgtggataaattggttgttggtatcgtaaatacctacatgcaaaccattttgtccggaccccgttttgaaaaagaccaggtcacctggcagcaactcgtctttatcaatttgcgtgccaatagaggcttgttgtttggtttcacggggcagctgcaaatcgaaacgatcgcgcatcgtcacaaccacaaatcccgaacagtccacaccgcgccgcgtcatgccaccataacgatacggcgtgccatgccagctttgtagctggtcgttcaaaccggcaataacggtaatcgaatcagaaagtctggcatttggcggcggtgctttatggtggctacacccggccagaagcagtgctgtgatcaaaataaggcagaaacgcattccgtacggttcctctgttttttattcttgcattaatttagcgtcgtaattacccgattttcaagatactaatgaaatcagatggtcgaaatcagcattctgtgaccttcgatatccagacggcgaaaattcatcccataggcctgcgccagatttggcggcgtgagcacctcttccctgcgtccactggccagcatttttccaccttttagcaaccacgcccgatgcgcatgacgcaatgtgtggttgagatcgtgactgctcatcacaatcgccagtccttgctgacacagcgcgctcagaattttgtctaacgcactttgttgcgcaacatcaagactgttcatcggctcatcaagaagcagcaattggcctgcgggattggcttgtggtgtgatttgcaacaccaccgcagcaagacgtacgcgttgccattcaccgccggaaagttgattggtgctacgtccgagtttgtcatcaagagccagcgcccctgcgacatcattcagtagttcggtacgcgttttatcgtgctgatgcagtgtcaggtagtgccagaccggcgttgcaaacggcggcgtctgctgttgtgaaagataggcgcgatgcagcgcgagttttgttgcggaccatgcttccagtggttgccccgcgaactgaatgcttcccttaccgctggtcattccggccattcgcgccagtaaggtactcttacccgcgccattcggccccaccaggtgcaggatctccccagcccgaacctcgccagaaagcggccccaggcgggtagattccgcaacatcttgtaactgcatcacaatagacattattttgccaacgccagtttaatgctttccatcacaatgggatcttccggcgtcatatccggggaaaaacgctggatgacttttccgtccctgccaaccaggaatttttcaaaattccataaaatatcatccgggtacagcggtgcacggcctttgctgaccatacgggcatagaatccgctctcttccggcgcgactgcggtcggcgctgcggcaatcaatttttgatacagcggatggcgtccttcgccattaacttcaatcttactgaacatcgggaacgtcaccccccatgtggtggtacagtaagttttaatctcttcatcgctgcccggttcttgttccagaaactggttgcacgggaatcccagcaccataaaacctcgatcgacccaggctttctgaatattctccaactgctcatattgcggcgttaagccacactttgaggcgacattgacaatcaacagcacattaccggcgaacttctccagcgtggtcacttcaccgtcgatatctttcactacggtcgtcagaatggaatcttgcatcgtttctcctgggtgtggtcagtaaaaatcttagcttttaatcatagaccgtctttttgcggctaacgtcctgcttttaacaataaccagataaacaccggcgcacctaacgttgcggtgaccacgccaataggcagctctgcggcagctaatgccaggcgcgctacaatatcggccagcagcaatgcgctcgcccctgccagcgcgcagccgggaagtaatacgcgatgatcggttaaaccacacaaccggagaatatgggggatcaccagaccaataaagccgatagcacccgccagcgccacactgacgccaaccatccagccggtcgctgccaccagcacattgcgccagaaccacaggggtaaacccagttgccgcgccgagatctcgccaagtgctaacatattcatcggcctggactgacaacagatccacaacaacacggggatcaatgccagcatcagccagctttgccgccagtctacgccgccaaaaccgcccatcatccagtacatcagctgacgcaaatcaactgaggtggaaaagtagatagcccacgtcattagtgcgctacagataatccctaatgcaacgccagccagcaataaccgactggtcgaaagatgacgacgggcgaaacgtaagagtattaaagtgatgataagcgcgccagcaatcgcacacagccctagcgcccagttggggagttgcccttgcccaagcaataccgcggcgataagccccacgcctgcgccgttagagacgccaagtagtccaggttctgccagaggattttcaaacaacgcctgcattacagcgccggatatagccagcgccgcaccaaccagcaatacagccagcgtacgtggcaggcgaatttgccagacgaacagttcgccacgaggagtaaaccagtcacctggcgagatccattgttcaccggcgcaaaggcttaagagaagcgccagcagcatcaaaactgacaggcataataaccagcgaatattttgtcgctgttgttggcgggcaagtgtcagcatggtatccgttctgctgaagtgtcatggcgttgattttacggtgactcttcgacagtgaaaagaaaaaaggccgcagagcggcctttttagttagatcagattactcgtctttgggcgaagcgttttcgacccggctttttaacttctgcccgggtctgaaggtcaccacgcgccgtgctgtaatgggaatatcctcgcccgttttcgggttacgtcccgggcgttgattcttatcacgcagatcgaagttaccaaaaccagagagtttcacctgttcgccgttttccagagcgcgacggatctcttcgaaaaacagttcaaccagttctttggcatcccgcttgctaagcccaagcttatcaaacagatattctgacatttcagcttttgtaagcgccataggttcaatccctcaatgatgcctggaatcgctcttttaatgcctctacacatttggcgacggtagcggcaatctcctcttcttcgagtgtacggctggtatcttgcaggatcaggcttatggcgaggctcttatacccctccgcaacacccttaccgcggtacacgtcaaataagtttacgccaactacctgatttacgccaactttcttacattcggataaaatatccgctgcgggaacgttttctgcgaccaccaccgcgatgtcacgacggttcgccgggaagcgagaaatctcgcgcgcctgaggcaccacgcggtctgcgagcttgttccactccagttcgaacaccagagtgcgaccgttaagatccagtttacgttccagttcaggatgaacaaccccaacaaaaccaatacgttcacctttcagataaatcgctgcggattgccccggatgcagtgccggattcgcttctgcacggaactcaacctcattcagtttaccggtcaggtcgagaacggattcaagatcgcctttcaaatcatagaaatcaacggtctcttttgccaggttccagtgctcttcgtaacggttaccgcaaatcacaccggctaacatcagatcctgacgaatgcccaacggtgcctgagtatctggtacgaaacgcagaccgctttcgaaaatgcgcacacggttctgctgacggttctggttgtacaccacggttgccagcaggccagtccacagagaaagacgcattgctgacatttcaacagagatcgggcttggcagcagtaaggcttcaacgcctggatggatcatctgctgcactttcggatcaacgaagctgtaggtgatcacttcctgatagcctttgtcgttgagcagcgttttcacgcgcttgagcgacaggtcagcttcacggtgagtacccataatcaggcttgcctgtaccggctcatccgggatgttgttgtagccgtaaacacgcgcgacttcttcaaccagatcttcttcaatctccatatcgaaacgccagctcggcgcaactgcctgccattcgtctttgccttcggtcacttcgcagccgagacgacgcagaatgtcagttacctgctcatccgcaatatgatggccgatcaggcgatccagtttgctacgacgtagagtgatggttgcacgcttcggcagcgttgcttcgttggtgatatcaattaccgggccagcctcaccaccgcagatgtcgatcagcagacgggtcgcacgttccatcgctttgtgctgcagtgccggatcaacgccacgctcataacggtgagacgcatcggtatgcaggccatgacgacgagcacgaccggtgatagacagcgggctaaagaacgcgcattccagcagcacgttttgtgtttcgtcattcacgccagagtgttcgccaccgaagatgccgcccatcgccagcgccttgttgtggtcggcgatgaccagagtgtcagcattcagcttcgcttcagtaccgtcgagcagcaccagcgtttcgccctctttcgccatccgcaccacaatgccgccttcaatgcgatctttatcgaaagcgtgcatcggctggcccagttcgagcagcacatagttggtgacgtcaacaactgcatcgatagaacggatcccgcaacgacgcagtttttctttcatccacagcggagttggcgctttaacgttaatgccttttaccacacggccaagataacgcgggcaggcttccggcgcttcgactgtaatcggcagcgtgtcgtcgatggtcgcaccaaccggaacgatttccggttgaaccagcggcagctggttcagcacggcaacgtcacgcgcaacaccaatgatgcctaagcagtcggcacggtttggcgtcacgctgatttcgatggtgttgtcatcaagtttcaggtattcacggatatcggtgccaatcggcgcatccgcaggcagttcgataatgccgctgtgatcgtcagaaatgcccagttcagagaaggagcacagcatcccttcagacggttcgccacgcagtttcgccgctttaattttgaaatcacccggcagaacagcaccaatggtcgctaccgctacacgcaggccctgacggcagtttggcgcaccgcagacgatgtccagcaggcgatcgccgccgacattcacttttgtcacacgcagtttgtcagcgttcggatgctgcgcacactcaaccacttcaccaacgaccacgccgtggaagctgccggcaaccggttctacaccgtcaacttccaggcccgccatagtgatttgatttgccagcgcatcgctatcaatcgccgggttcacccattcgcgtaaccacagttcactgaatttcataatctattcctgccttatttaaactgtttgaggaaacgcagatcgttttcgaagaatgaacgcaggtcggtgacgccgtaacgcaacatagtcagacgctccatccccatcccgaaggcgaaaccagagtaaacttccgggtcgatgccaacgttacgcaacacgttcggatgcaccatcccgcagcccagcacttccagccatttaccgtttttacccatgacgtccacttctgcagaaggttcggtaaacgggaagtaggaaggacggaagcgaatctgcaaatcttcctcaaagaagttacgcaggaagtcgtgcagcgtgcctttcaggttggtaaagctgatgttggtatcaacaatcagaccttccatctgatggaacatcggcgtgtgagtctggtcgtagtcgttacgataaacacggccaggcgcgatgatacgaatcggtggctgctgggctttcatggtgcggatctgtacgccagaggtctgggtacgcagcaggcgggtagtgtcaaaccagaaagtgtcgtggtcagcgcgcgccgggtggtgaccaggaatgttcagagcatcgaagttatgataatcgtcttcgatttccggcccggttgccacggtaaagccaagctcaccgaagaaactttcgatacggtcgatggtacgggtaaccggatgcagaccgccgttttcaatgcgacgacctggcagagagacatcaatcgtttccgccgccagacgcgcattcagtgcagcgctttccagttccgctttacgcgcattcagcgcctgctgaacctgctctttcgcttcgttgataaccgcaccagctgccggacgctcttctggcggcagctcacgcagggtcgtcatctgaagggttaagtgcccttttttacccaaatattcgacgcgcacattatctaacgcggcaacatctgacgcctggctaatggccgccttcgcactggcaaccagttctgcgagatgtgacatggttttcctcattgtgtcagtggtgacactggttcgttggacttagagcctatcccatcaggctattttacttgccattttggtcccgggctgtgctcgaaattctcacgtacttaaatacgctccggtttctccgcgctggccgtgtccagtctggctgcgacaattacacctgatgagacaggctttttatttttcaaaacgcgcatacaaaaaaagcctccactgggaggctttcaggcgctgttttccgtttctcttctcacgcgctagcctcctggattcaggtgctaaagtaaaaaaagaagcggaaaatagcagcattcattgcttgcgttaccttttggtactcttcaaaagacctttattgaaaaggctacggcgataaaagtcaatgttttgatggcgttgaaacgaaaagagggagactagctccctctttcaactggcttatgccagagctgctttcgctttttcaaccagagcggtgaacgctactttgtcgaatactgcgatatcagccaggatcttacggtcgatttcaacagaggcttttttcaggccattgatgaatttgctgtaagaaataccgttctgacgtgctgctgcgttgatacgcgcaatccacagttgacggaactgacgcttacgttgacgacggtcacggtaagcatactgaccagctttgataacagcctggaaggcaacgcggtatacgcgagaacgcgcaccgtagtagcctttagcttgtttcaaaattttcttgtgacgtgcacgtgcaataacaccacgttttacgcgagccatatgtgctctcctgtatctatattctaattaaaaagttaaaaacgttaacggcttatgcgtacggcaggcacgcgattaccaggcccagatcgcctttggaaaccatggctttcggacgcaggtgacgtttacgtttggtcgcttttttggtcagaatgtgacgcaggttagcgtgcttgtgcttaaaaccacctttaccggtttttttgaagcgcttagcagcaccgcgtacggtcttaatttttggcattttaataacttccacttcgcattgttaataaacgaaacaaaggcgaacaaagcctgtgaagcccgaaggctccacagacagtgctacttgaaggccttactgtttcttcttaggagcgagcaccatgatcatctggcggccttcgatcttcgttgggaaggattcgaccactgccagttcttgcaaatcgtctttcacgcgattaagcacttccataccgatttgctggtgcgccatctcacgaccgcggaaacgcagcgtgattttggctttatcaccctcttcgagaaagcgaatcaggctgcggagttttacctgatagtcgccttcatctgtaccaggacggaatttaatttccttaacctggataactttttgctttttcttctgttccttagaagacttgctcttttcatagaggaatttgccgtaatccattatacgacaaaccggcggctcggcgttagggctgatctcgactaagtctactccggcttcttctgctttctccagagcttctctcagactcacaataccaagctgctcgccttccagacctgttaagcgaacttcctgggcgcgaatttcgccattgatacggttagggcgcgccgtttgaactcgttttccgcctttaataccttattcctccaattgtttaagactgcggctgcgaatctcttgttgcagcttctcgatcacttcatttacgtccatgcttcccaggtctttaccacggcgggtgcgaacggcaactttgcctgattccacctctttatcaccacagaccagcatatatgggacgcgacgcaaagtgtgctcgcggattttaaagccaatcttctcatttctcaagtctgctttaacacgaatgcccgcatttgatagtttttgcgtcaattcgttaacgtattcagactgtgaatcggtaatattcatgataacaacctgaaccggcgcaagccaggtcgggaagaaaccagcgaactcttcggtcaggataccgatgaaacgttccatcgaccccagaattgcgcggtgaatcattaccggtactttacgttcattgtcttcgcctacataagaagcgctcagacgagacggcaaagagaagtccagctgtactgtaccgcactgccatgcacgatcgaggcagtcatacagggtaaattcaattttcggaccgtagaaagcgccttcacccagttgatattcaaacgggatgttgttttcttccagcgcaaccgccaggtccgcctcagcacgatcccacatttcgtcgctgccaatacgtttttcaggacgagtggagagtttgacgacgatcttctcgaagccaaaagtgctgtacatatcatagactaaacggatacatccgttaacttcatcgcgaatttgttcttcagtacagaagatatgcgcgtcatcctgggtaaatccacgcacgcgcatcaggccatgcagcgaacctgacggctcgttacggtggcagctaccaaactcggccatacgcagcggcagatcgcgataagacttcagcccctggttgaaaatttgtacgtgacccgggcagttcatcggcttaatgcagtattcacggttctcagaagatgtggtgaacattgcatctttgtagttgtcccagtgaccggttttttcccacaggacacggtccatcatgaacggacctttaacttcctgatactggtactctttcagtttagaacgaacaaacacttccagttcacggaagatggtccagccgtcgttgtgccagaataccatacccggcgcttcttcctgcatatggtacaggtcgagctgtttaccgattttacggtggtcgcgtttcgcggcttcttccaggcgctgcaggtaagcgttaagtgcttttttgtctgcccacgccgtaccgtaaatacgttgcaacattttgttgttgctgtcgccacgccagtaagcccctgccgttttcattagtttgaaatgatggcagaaacgcatgttcggtacgtgcggaccgcggcacatatcgacatattcttcatggaagtacagacctggcttgtcatcatgggcgatgttttcgtcaagaatggagactttgtagctctccccacggttggcgaaagtttcacgcgcttcgtgccagctgactttcttcttaatgacgtcgtagtttttctcagcaagctcatgcatccgcttctcgagtgcttcgacatcttcctgggttaacgtgcggtcaagatcaacgtcgtaataaaaaccgttgtcaataaccgggccgattgccattttggtatgcggccaaagttgtttaatcgcgtgccctaacaggtgcgcacaggagtgacgaatgatctccagaccttcttcgtctttggcggtaatgatcgacagttgtgcgtcgttttcaatcagatcgcaagcatcaaccagttcgccattaacgcgccctgcgatacaggctttcgccagacctggaccaatgtccagcgcaacatccatggggcttacagcgtgatcgtaatggcgttggctgccatcaggaagagttataacaggcattttatatccttatttgcagtggtgacccacacgaaagatcacatacaaagaaaaatttgtttattaacagttcattgcgaaaccatctagccaacaaatgctaaattggttcgcaatcaggtacacaaatgaaagacattaacctctcaccttccacccggttgagcgatgttaacactaaaaaaagggagattgtacctttccgtttcacattgattcgattcgcaattcgtttgtagtgagtacaccagcaaaacgcttaaagaacaactgataacatcacggtgcgtctgaaaggtttactgcgagcggatttacagcagcataaactgaatccagcaaagttcgttgcgtgatttggcggtagtattttaaacgctcatgagattaatgacgaagtggtcatatcacaatgataaaagtgacacaattcttataacaatttttcgtgcacatttcgttctggcgataataattaatcatcatcctcaaaacctccagatatatataaggcgaacagattatgagtcaaaacgatatcattatcagaactcattataagtctcctcatagattgcacatcgatagcgacataccaacaccttcatcagagcctattaatcaatttgcgcgccagctcatcaccctacttgatacctctgacttaagttcgatgctgtcatactgtgttactcaggaatttaccgcaaactgtcgaaaaatatcacaaaattgttattccactgccctttttaccattaactttgccacttcacccatccatacagaaaatatactcattacattacactataaaaaagaaatcatttccttattactggaaaccacgcctattaaagctaaccatttgcgaagcatactggattatattgaacaggaacagttaactgctgaagatcgtaaccattgtatgaaactgtctaaaaaaatccatagagaaaaaaactatacacccaacagtaaatctcaatggtagtgcatgttttttgcaatctccttctgacgctattttttgtcgccatctgtcattgcaatacgcccttgattcattgagaaatggaaaaggcaaagtcaacctgattaaacattactcctccgttgaatccatacagcagcatgtccccttagtccgggacgcggagttcagagcattacttcgccatcctcctgcagggagtcgcgttatcgcgagtaaggattttggcttcgctttagatattttcttttgtcgaatgatggcaaacaatgtcagtcatatgtccgcgattttatatatagacaatcatactttgtcagtaaggctacgaataaagcagtcagtgtatggacaattaaattatgttgtgtccgtttacgacccgaacgataccaacgttgccgtcagagacacccacaggacagcacggggctttctttcgcttgataagttcatcagttcaggtcccgatgctcagacctgggctgatagatatgttcgcaactgtgcaattgctattctgcccctattacctgtgggagttccaggggctattttcgcgggtattgcatcacgaatgccatttgcccctatacatccatcggcaatgttgttaataatggctacaggccagtctcaacagcttattacattattcaaacagttgcccatactccctgaaaaagaaatcattgaaataataactgcgcagaatagcgttggtacacctgctttatttttggctatgatgaacggacatactgacaacgtgaaaatatttatgcaagaaattcagtcactggtagataatcacatcattcatgaagataatctggttaaattactgcaaactaaaagtgctaacgaaacacctggactttatatctccatgttgtatggattcgatgaaataatcgatatctttctgaatgcattaaccactccaatagcacaagagcttttaaacaaaaaactggtgatgagtattttagccatgaaaatacatgatggtgagccaggattatacgccgcaatggaaaataatcaccctttgtgtgtcacacggttcctctctaaaattaatggcatcgcctttaaatacaagttgagcaaagctaacatcatggatttattaaaaggagctacagcacagggaacccctgcattatacatcgccatgagcaagggtaatgaagacgtcgtgttatcttatatatcgacgctgggtgcttttgcaaaaaaacattcttttagtcaacatcagttatttacactattggccgctaaaaatcatgacaacatgtcagctgttcatatagccattcatcataagcattataaaactgtagaaacatattatgctgctattaatgcaatcagccaaagcctgagttttagtgctgatgaaataaagacgtatttataaccagctatttacgatatatatcgatacataattttatttttttcataaaacgcagaaacagtgaccatgtgcacaacgccacccgacggctgtaataacaaaaaatcccttgatgcctgtcccttttgttacactccgttatcacgcacaagagatatgcaggacactggtatgccgactaaacgctttgataaaaaacactggaagatggtggtggtgctactggcaatctgtggcgctatgttgttgctacgttgggcagcaatgatttggggctgagcagtgacaaacgaagacagccagaccgcataacacggtccggcagataattttacatgctgtagcccagcgataaggttgtccgacggtcggtatgttccggtgcagactctggaggttcagagttccatgtgacgttgtaagccaccttcagtccaaaatgttcattaatagcaacatttaatgcgctttcggagttcagcgttgtgtcttccgcgccaaagaccgaaacaccctgcgtaaatttagcgttgtcagtcaactgccatgcataagccccggaggcatagcccagcggctgggtttcactggcattgtcggtatatttgtcgtaacgcacacctggaccgaattcaaagcggaaactgtgtaccgggccattcaaaaactgacgaccataacccgcggtcaacacatcgcgctctcgatagccgttataacggtctgtcagccagcttgcctgaccaaataaatagtcataatcagttaaattaaaacggctacgcccgcccgccgcatatttttctgaagaacgctcatcattagaagaagtattactggcgttcccccacagcgaccaggcagtggtgtgtccataccaggtcatggtggtgtcagccgtaagtgaggagcttttcgtattgcctgattgtgcaagatatcctgcgttcagattaccttcgaaaggttttttagcgctggcaggatcatccatgacagtaaaaacggaatcatcggcagctgcattcagtgacgcaaacatgccccccgccaacataacgatggcaggaactgtcttcaaaagcttcatttatcaagagtccgtacaacaaaaaaagagaccatcgcggtcccggaaactttcttaaggatcaaagattagcgtccctggaaaggtaacgaattataaaaaggcgcgaataacttagcaatgtattcttatttcattttttgaataagcatgtggcgaaaacagatttttatttatatatatttatctgcaaaattttaaataaagctccaataaatcatattgttaatttcttcactttccgctgattcggtgccagactgaaatcagcctataggaggaaatgatggtacgtatctatacgttgacacttgcgccctctctcgatagcgcaacaattaccccgcaaatttatcccgaaggaaaactgcgctgtaccgcaccggtgttcgaacccgggggcggcggcatcaacgtcgcccgcgccattgcccatcttggaggcagtgccacagcgatcttcccggcgggtggcgcgaccggcgaacacctggtttcactgttggcggatgaaaatgtccccgtcgctactgtagaagccaaagactggacccggcagaatttacacgtacatgtggaagcaagcggtgagcagtatcgttttgttatgccaggcgcggcattaaatgaagatgagtttcgccagcttgaagagcaagttctggaaattgaatccggggccatcctggtcataagcggaagcctgccgccaggtgtgaagctggaaaaattaacccaactgatttccgctgcgcaaaaacaagggatccgctgcatcgtcgacagttctggcgaagcgttaagtgcagcactggcaattggtaacatcgagttggttaagcctaaccaaaaagaactcagtgcgctggtgaatcgcgaactcacccagccggacgatgtccgcaaagccgcgcaggaaatcgttaatagcggcaaggccaaacgggttgtcgtttccctgggtccacaaggagcgctgggtgttgatagtgaaaactgtattcaggtggtgccaccaccggtgaaaagccagagtaccgttggcgctggtgacagcatggtcggcgcgatgacactgaaactggcagaaaatgcctctcttgaagagatggttcgttttggcgtagctgcggggagtgcagccacactcaatcagggaacacgtctgtgctcccatgacgatacgcaaaaaatttacgcttacctttcccgctaacaaaaacattcccccagcattgggggaatcatcaccaacctgtcggcaacgcgtttctccgactatgctcaaaagtcatgtgataacaaaggggtgaactatggccagtggcgatcttgtccgttatgtcataaccgtcatgttgcatgaggatacattgactgaaattaacgagttgaataattacctgactcgcgacggttttttgctcactatgacggatgatgagggaaatatccatgagctgggaactaacacttttggacttatcagtacccaaagtgaagaagaaattagagaactggtttcggggcttacccaaagtgcaaccggcaaagatcctgaaatcaccatcacgacctgggaggaatggaatagcaacagaaaataaatggtttttgggcaataatcagtctgtggtgtgcgttagctcgtgtttttacaccgcattcttgcgctaaccttatgatctggcagacaacatgggagagacatcatgtggcaggcaatcagtcgtcttttgagcgagcagttaggtgaaggcgaaatcgaactgcgtaatgaactgcctggcggagaagtccatgccgcatggcatttgcgctatgcaggacatgattttttcgtcaaatgtgatgaaagggaactgcttcccggttttaccgccgaagccgaccaactggagttactgtcgcgtagtaaaaccgtcaccgtgcctaaggtttgggcagttggcgctgaccgtgactacagttttctggtgatggattatctcccacctcgtccgctggatgcgcatagcgcatttattcttggtcagcaaattgcgcgtttacatcaatggagcgaccaaccacaatttggccttgatttcgataacgcgctctccacaactccacagcccaacacctggcaacgtcgctggtcaacgttttttgctgaacaacggattggctggcagttggaactggctgcagaaaaagggatcgctttcggcaatatcgacgccatcgtcgagcatattcagcagcgtctggcctcacatcaaccgcagccttctctgttgcacggcgatttatggtccggcaactgtgcactgggtccggatggcccgtacattttcgacccggcctgctactggggtgaccgagagtgcgacctggcgatgttaccgctgcatactgaacagccgccacaaatctatgacggctatcagtcagtatccccgctacctgccgatttccttgaacgtcaaccggtttaccaactctacacgctgttaaatcgtgcaaggttatttggcggtcagcatttggttattgctcagcagtcattggatagattattagcagcatgatatgggttgaggataatggccgctccgtgcggccttttgattaaataaacccaagcagagaaaagaacacataacctgcagcaatacaaataaccggcaggatatacagtgagaaaaactgcaggaaaatagtatggtgcggaacaacaatacgggactcaatttgttcacgcgttagcccctcttcccctttggctttttccagaatgagttgatcttcaacaccttcccgcaagaagcgcgcctggcgactcatccgggcaccggaatcctgcaacgccagtccgacaaaaatcaggatgaaaatcacccagaacataacgttcacgccaccattaaaattgggcgtcggggagttataccagaatagattcaaaaaaggcgtattcgcctgcatcatatcgatcatgacatgagtaaagtcgagcatgaccgcattaatgccttccttgttttcctgccgggtattcataaatttcagcaaagaaatcaatgtagagatcaatgcaggtataaaaatcacccaacccaaaatccttttcaaaacagcaatgcgtccagcttgttgatacgtcatgagttctccttgattaagacgcgtcgtttcacttagtttacctgtagatatctgttttcgcccattctttaaaggcgatatgataggcgcttaatcataagcacggcttaataccttacacataatgctctaaaggagaggttgtaatgtcaaccccgcgtcagattcttgctgcaatttttgatatggatggattacttatcgactcagaacctttatgggatcgagccgaactggatgtgatggcaagcctgggggtggatatctcccgtcgtaacgagctgccggacaccttaggtttacgcatcgatatggtggtcgatctttggtacgcccggcaaccgtggaatgggccaagccgtcaggaagtagtagaacgggttattgcccgtgccatttcactggttgaagagacacgtccattattaccaggcgtgcgcgaagccgttgcgttatgcaaagaacaaggtttattggtgggactggcctccgcgtcaccactacatatgctggaaaaagtgttgaccatgtttgacttacgcgacagtttcgatgccctcgcctcggccgaaaaactgccttacagcaagccgcatccgcaagtatatctcgactgcgcagcaaaactgggcgttgaccctctgacctgcgtagcgctggaagattcggtaaatggcatgatcgcctctaaagcagcccgcatgcgttccatcgtcgttcctgcgccagaagcgcaaaatgatccacgttttgtattagcagacgtcaaactttcatcgctgacagaactcaccgcaaaagaccttctcggttaatgaccaggggcagtgatctcgctgcccctggttctttatctgaaattgcattcaactgacggattaatcgtcaatttaagagaaagagttacaccgtcaccacttccgtgcactgtataaaaatcctatactgtacgtatcgacagtttagtgagttttatcatgacggcggaaggtcaccttctcttttctattgcttgtgcggtatttgccaaaaatgccgagctgacgcccgtgctggcacagggtgactggtggcatattgtcccttccgcaatcctgacgtgtttgttaccggacatcgatcacccaaagtcgtttcttgggcagcgattaaaatggatatcaaaaccgatcgcccgcgcttttgggcatcgtggttttacccacagtctgctggcggtatttgcgctgctggcaaccttttaccttaaggttccggaaggctggttcattccggctgatgcgctacaaggaatggtgctgggttatttgagccacatacttgccgatatgctgacacccgccggtgttcccctgctctggccatgccgctggcgtttccgcttgcctatcctggttccccaaaagggcaaccaactggaacgttttatctgcatggcattatttgtctggtcggtatggatgccccattcattacccgagaacagcgctgttcgttggtcatcgcaaatgatcaataccttgcagatccagtttcatcggcttattaagcatcaggttgaatactaaaaaggcaaaaatcacctttctggaataagcaattccatttgaatataagagccagctcacagttctgttaatcttgcgccaacactatgactgctacgcagtgatagaaataataagatcaggagaacggggatgaactttccattaattgcgaacatcgtggtgttcgttgtactgctgtttgcgctggctcagacccgccataaacagtggagtctggcgaaaaaagtgctggtgggtctggtgatgggtgtggtttttggccttgccctgcataccatttatggttctgacagccaggtacttaaagattctgtacagtggtttaacatcgttggtaacggctatgttcaactgctgcaaatgatcgttatgccgttagtcttcgcctctattctgagcgcggttgcccgtctgcataacgcatctcagttaggcaaaatcagttttctgaccatcggtacgcttttgtttaccacgctgattgcggcgctggtcggtgtgctggtcaccaacctgtttggtttgacggctgaaggtctggttcagggtggtgcagaaactgcacgtctgaacgccattgaaagtaactatgttggtaaagtctctgatctgagcgttccgcagctggtcttgtcctttatcccgaaaaacccgtttgccgatcttaccggagccaatccgacgtcaattatcagcgtggtaatttttgccgcattcctcggcgtagctgcattgaaactgctgaaggatgatgcgccgaaaggtgaacgcgtcttagccgctatcgataccctacaaagctgggtgatgaaactggttcgcctggtcatgcagttgaccccttacggcgttctggctctaatgaccaaagtggttgcaggttctaacttgcaagacatcatcaaactgggaagtttcgttgtcgcgtcctacctcggtctgctgattatgtttgcagtgcatggcattctgctgggcattaatggcgtgagtccgctgaagtacttccgtaaggtatggcctgtgctgacgtttgcctttaccagccgttccagtgctgcgtctatcccactgaatgtggaagcacaaacgcgtcgtctgggcgttcctgaatccatcgccagtttcgccgcctctttcggtgcaaccattggtcagaacggctgcgccggtttgtatccggcaatgctggcggtgatggttgcgcctacggttggcattaacccgctggacccgatgtggattgcgacgctggtcggtattgttaccgttagttccgcaggcgttgccggtgtcggtggtggtgcaactttcgccgcactgattgtactgcctgcgatgggcctgccagtaaccctggtggcgctgttaatctccgttgaaccgcttatcgacatgggccgtacggcgttaaacgttagtggctcgatgacagctggcacgctgaccagccagtggctgaagcaaaccgataaagccattctggatagcgaagacgacgccgaactggcacaccattaattcttatgctggcaacggtccgttttgtataggggccgttgccttactttttaaatgttccatcgcggcgatgcatactgactcatatttaaacagatcgtcagcgaaaaaaatgtccaacttatcaatacattcctggctcaatgaatgtgcctgtagcgagaagcttaaaacctcatacccgagacgttttctaagtgaactatctggaatactcataatatcttcaagcacaccacttcccattcccggaagatttagtggattaaaaagaagattgatattaagcattgatattatcgaaggaaactttaggagactctcatttttttgaatcgcagcaaaaatgctcccgacaggatgtatataattttgttcatagtatatagtccttaaatagtgaataaccaacctgttttttatactgatcaaattggtcattttttctgggcgaaatacagaagtgacatccattccaataaaatctttatttatacctcttatccgaatttcactaccataaagattattaattattactctatatttaacattgtcctgcagatatgtatcaaaactaagtgctggcgctcctggctttgaggcatcatagttaatgttagacatataggcaatcatataattaaagtttgattctgctatttcatcgcagtcacattgacccgttgatataaagaaagtgagtgctgtcatagtagactgcagcctttctttaaaagagtcgaaagccaggcttttaatatttaaatcaccataattactctgtattaagtttgtagaaaacatctcccgcctcatattgttaacaaaattattatctcatttaaatctaagtcatttacaatataagtttaagagcgacgccacaggatgaactatcaaaaatagctcatcatgattagcaaaacttaaccattttaaaataaataaacaattaaagaaaaaagatcacttatttatagcaatagatcgtcaaaggcagctttttgttacaggtggtttgaatgaatgtagcaacgaaatacagaatttcaggtcatgtaactcccggcaaaaccgggaggtatgtaatccttactcagtcacttccccttcctggcggatctgatttgcccaacgttgggcagattcaggcacagtaaacgccggtgagcgcagaaatgactctcccatcagtacaaacgcaacatatttgccacgcagcatccagacatcacgaaacgaatccatctttatcgcatgttctggcggcgcgggttccgtgcgtgggacatagctaataatctggcggttttgctggcggagcggtttcttcattactggcttcactaaacgcatattaaaaatcagaaaaactgtagtttagccgatttagcccctgtacgtcccgctttgcgtgtatttcataacaccgtttccagaatagtctccgaagcgggatctggctggtggtctatagttagagagttttttgaccaaaacagcggccctttcagtaataaattaaggagacgagttcaatgtcgcaacataacgaaaagaacccacatcagcaccagtcaccactacacgattccagcgaagcgaaaccggggatggactcactggcacctgaggacggctctcatcgtccagcggctgaaccaacaccgccaggtgcacaacctaccgccccagggagcctgaaagcccctgatacgcgtaacgaaaaacttaattctctggaagacgtacgcaaaggcagtgaaaattatgcgctgaccactaatcagggcgtgcgcatcgccgacgatcaaaactcactgcgtgccggtagccgtggtccaacgctgctggaagattttattctgcgcgagaaaatcacccactttgaccatgagcgcattccggaacgtattgttcatgcacgcggatcagccgctcacggttatttccagccatataaaagcttaagcgatattaccaaagcggatttcctctcagatccgaacaaaatcaccccagtatttgtacgtttctctaccgttcagggtggtgctggctctgctgataccgtgcgtgatatccgtggctttgccaccaagttctataccgaagagggtatttttgacctcgttggcaataacacgccaatcttctttatccaggatgcgcataaattccccgattttgttcatgcggtaaaaccagaaccgcactgggcaattccacaagggcaaagtgcccacgatactttctgggattatgtttctctgcaacctgaaactctgcacaacgtgatgtgggcgatgtcggatcgcggcatcccccgcagttaccgcaccatggaaggcttcggtattcacaccttccgcctgattaatgccgaagggaaggcaacgtttgtacgtttccactggaaaccactggcaggtaaagcctcactcgtttgggatgaagcacaaaaactcaccggacgtgacccggacttccaccgccgcgagttgtgggaagccattgaagcaggcgattttccggaatacgaactgggcttccagttgattcctgaagaagatgaattcaagttcgacttcgatcttctcgatccaaccaaacttatcccggaagaactggtgcccgttcagcgtgtcggcaaaatggtgctcaatcgcaacccggataacttctttgctgaaaacgaacaggcggctttccatcctgggcatatcgtgccgggactggacttcaccaacgatccgctgttgcagggacgtttgttctcctataccgatacacaaatcagtcgtcttggtgggccgaatttccatgagattccgattaaccgtccgacctgcccttaccataatttccagcgtgacggcatgcatcgcatggggatcgacactaacccggcgaattacgaaccgaactcgattaacgataactggccgcgcgaaacaccgccggggccgaaacgcggcggttttgaatcataccaggagcgcgtggaaggcaataaagttcgcgagcgcagcccatcgtttggcgaatattattcccatccgcgtctgttctggctaagtcagacgccatttgagcagcgccatattgtcgatggtttcagttttgagttaagcaaagtcgttcgtccgtatattcgtgagcgcgttgttgaccagctggcgcatattgatctcactctggcccaggcggtggcgaaaaatctcggtatcgaactgactgacgaccagctgaatatcaccccacctccggacgtcaacggtctgaaaaaggatccatccttaagtttgtacgccattcctgacggtgatgtgaaaggtcgcgtggtagcgattttacttaatgatgaagtgagatcggcagaccttctggccattctcaaggcgctgaaggccaaaggcgttcatgccaaactgctctactcccgaatgggtgaagtgactgcggatgacggtacggtgttgcctatagccgctacctttgccggtgcaccttcgctgacggtcgatgcggtcattgtcccttgcggcaatatcgcggatatcgctgacaacggcgatgccaactactacctgatggaagcctacaaacaccttaaaccgattgcgctggcgggtgacgcgcgcaagtttaaagcaacaatcaagatcgctgaccagggtgaagaagggattgtggaagctgacagcgctgacggtagttttatggatgaactgctaacgctgatggcagcacaccgcgtgtggtcacgcattcctaagattgacaaaattcctgcctgatgggaggcggcgcaattgcgccgcctcaaatgatttacatagtgcgctttgtttatgccggatgcggcgtgaacgccttatccggcctacaaaactgtgcaaattcaatatattgcaggaaacacgtaggcctgataagcgaagcgcatcaggcagttttgcgtttgtcagcagtctcaagcggcgcagttacgccgcctttgtaggaattaatcgccggatgcaaggttcacgccgcatctggcaaacatcctcacttacacatcccgataactccccaaccgataaccacgctgagcgatagcacctttcaacgacgctgatgtcaacacatccagctccgttaagcgtgggaaacagtaagcactctgacggatagtattatcgataaacgccggatgacacatcacctccagcgaacgatcaccccgatggcctgcgtcatccagcacttgcaggaacagcgactcactgatctcttcaccgtagaatgcactgctgaatccctgggtagtgcgcaggttgaccggcaaatcaaacgccatctgacgatccgcccgcaacgcaatgccctgctctgccgcaaacctggcaacaatcgggaaaatctgcgggaacatatgcacatgatgatggctatcaagatgcgtaggtttgcgtccaaatagctcaatgaaacgcaaatactgactgacaagctcctgagtaatttcttccagcggtaaagcatcttcttctgccaactgccagatccattttcccagcacaccatcgcgggttaaccccggcatagctgtcagtggcttacccatagtaaggacaaagtgcatccctatggccagactcggttcatcacgactcaactgcaccgcatggtcaatagcctgcccattcaccagcgccgtcgtcgacgtgacaatcccattgcgacaggcctcgataatgccgtagttctgacctttgcttaagccaaaatcatcggcattaacaatcagtaagcgttccataatcagcctcggttaatgtgcttttttaagctctgcgatgcagtcggcaaagtttggcagccatttctcgtgcgccagaatcatctcgcgtgccagcagctcagcatcgcgatcggaatgcaccaacggactaaggtttagcgccagtaacacatcgttaaattctccgctaagtgcggcgttactggcagcaatctcgaagcctttaatggtgtgaatcagccccattactttatcatcgaaatgcgtaatgcgcggatgtggcgtcgcgccatcgcgccccagcttacaggtcatttctactgcccagtctgccggaatattatcaatctgcccatgatgcgggatattaacgtaatgttctgcttgcttgtcgttgtagatagcgttgatcacttcgcatgctgcatcagagtaataagccccaccgcgctgttccagttctttcggcttaactttcagctcaggatttttatacagctcaaaaagttgtttctcgactttctgtactacctgcgctcgtgcgccgcctttgtagtattcgcccatttcaatagccagcatctctttctgcttgaagtaatacagcagataagaacatggcagcagattcaacgaacgaattaagccctcactaaatggcagatcgaaaatattttttacagaggacgcttttaactgccctgacgccacaccatcaagcaattcggcaaagcgcgacttgccatttatcagcacatccttaatgaacaccatatggttgaggccgaacaaatcgatagataaatcatcgctgtctttcagcatcagaacatcgcgaataaacatcttcatgccgatcggaatattacacacgccgataaagcgtttaaatccggtatgacgataaacggcttcagtgaccattcccgccgggttagtgaagttaatcacccatgcattcggacaaagttcttcgacatcttttacgatgtcaaaaatcaccggaatggtacgcagacctttaaacaaaccgcccgcgccgttggtttcctgaccaagataaccatgacttaatggaatacgttcatccagttcacgcgccggtaattggccaacgcgcagttgggtagtaacgaaatcagcatctttcaatgcttcgcggcgatccagcgttttataaagcttcatcgggacgccagcgttatcaatcatccgttggcagagatcgaaaataatatccagtttcggtttaccaccttcgacatccaccagccataattcgctgaccggcaattcgtgataacgcttaataaatccttccagtaactccggggtatagctgctcccgccaccaatagtgacgacttttaatttctggctcataatttctcccttcagtacagaatactgatatctggcatatctgcccccccggacataaataatccagcaacaggacagatatgtgaattgtcaggtataacgacttactgattaaattcagtcaatttcttacgatagctcttaggcgtaaaggacgttaatttcttaaacgttttaataaacaaactcgggctactataaccggcctcaaacgcaatatccgtcactgaatagttggtcatttccagttgttttttggcaaaattaatacggatttcattaataatctgcattggcgttttgccataatatcgttgagtcgctcgcgtcaaatattcctgtgatttggctgacaacgccaccatattctccagcgccgattcactaaactgctctttatcatgcatcttttctaccgtacttttcagccactgcggtacatcatcaatcacctgttcttcgcggtaatgacgtaaacggttaatgacataaaaagtaaccatctcaacaaactcttccagccctgtttcgcggaaattcaatgaagaaatcactgtttccacataggtgagaaaagcgttattggtccggtatacctgcgaagcgacaaagcaataaggcaacaatggcaggtaatgctgctcaaaaaagcgtttactgatcccaacgttcaatatgcgcgtggcaccaaactcataaaaactttgatggtgcgaacctaacggaataaaaacaaaatcgccccgttccagtaacacgcgcttaccgttaatctcctggaaataacgcccggttaataccagagtaaattcataatagtcgtgctgatgcagtccgctgatactctcagttttgttatagataaacacatggaagtttttgccattaaacaactgctgttctcgggcagtggcaatttccggcgcgttaatcactggctgcatcatcgactccttatgccttcagtttttcatgaagctcaattaattcagtaatcagttcacgcgcaagcatggacgtcattaaatgatcctgagcgtggaccagcaccagactcactttcatcttaccttcgcccgcatcgccttcaatcagtttcgtctgtaccagatgcgcttcattcaatgccatccgtgactgatccatcatggcttttgctgcggcaaaatcgccctgcttcgcctgtttcagtgccgcatacgccaggctgcgcgcttgtccggagttgatgatcagccccatcaccacttcttccagctcttcagcttccgtttgcgtatcgggaatgttatcgagatccatcatacatcgttcctctcttttcttaccggcacgattacccgtaccggcatcgattaaaatttcagggcgttagcgatatcttcttcgctctcttctttatcaatcgcattttgtgctttgttagccaccacaacaaagggcagataaattaacgttgcgatgccaaggttgaagagtgcgaccagcaatgcggcgacgctaccgttggtgttaaagaaggctcccagaccggttggcatggtccacggtgcaatattggtcaccggaggaataatgcccatgtagtacgctgcgagggtgattgccgccagaatcggttgtaccagtacaaacgggataaacatcaccgggttcatgataattggcagaccaaacagaatcggttcgttaatctggaagatgccggacggcagcgccagttttgccacctgacgataatcagcacggcgagaggcgataaagatagccaggatcaggcctaaagtcgcaccactgcccccaaggaaaataaaggagtccagcatcggcttggcccagatatggaaggtcttaccggctgccagcgccgcttcgacggaaccatattgctgataggtcgcgatattttccagtgcccacggcgtcataatgccgttgtccagtgcggtcagcgccagcgcgccatgaataccgaagaaccagagcagtggaacaaagatcacataggcccagcccaccacgctacccaacgatgccagtggggttgagatggtatccataatgatctgatggaagttggtgccccaggtattcaacgcccaggcaataatccccatcacggaaagaataataaagccgggaattaatgccgagaaggaacgcgatactgaagcaggtacgctgtcgggcagtttaatgacccaattgcggcggacaataaaggtaaacatttctgccaccaccaggccaataataatcccggagatgatattcgccccacctaaccagtttgcaccaaccgcataggcctcaccgacactatatggggtgacggtcataaatgctgcaacggataacaacccagccgccagcgcatcgactttacgctcttctgccagcgccatgccaataaagaacggtgccattaaagacattattcctaatgttccgttatatacgttgccgccaatacctttcagaccattaagtgtttcaatggttgaggcgtcgaggcgaatacctaaggaataaaaaaacgacccctccccaaagcttagaaaaacgttgttaattaatacaaacatggcccccgcaagggttaacggcattaagcgaataaagccatttttgattgcattaacgtgtggctgctttcctattttaactgcaaaagggaggagtaccttttcaagcgatgcaataacattactcatagaaaaatacccttaaaaaccgcaatttaaatattgcggtattgatttatgaaataactctttgacgggaaaatttaaaataaattaatttgctgcggcttttttaatcgctgcaaccgcagccttaagcacgcctaaaccatcgactttgccataaagcagcgagtcaattacttcaaccggtttgttgggtaacaaacgctggatttcgggcaacatataagcaatctgcggccctaataacacgacatcggcattctgacctttttcaccagccagtgtttccggaaatgcttcaataatgaccggaacttcatatttttctgcctgtgcgcgcatttttgataccagtaaagaggtagacatgcccgcagaacaaaacagataaatgtgtttcttttccataaaactgccctcatcgacgattatctgtcagccagacactccgcaagccttaacctgcttccatgctctgggtaacttgcgaaaccaacatgactttttttgtggctgaaaggagtatacggtatagacctgagcaatagtatttctttgaccttataaattgtttctccttgacctgtggttatgaccctcttcacatttcgggcaaataattcgcgaagataattaagaactcaggccaaaaaaaaccggcgcaatggccggtttccgttgttactcaagctttcagacgaattgattacttcgcagcctgtggatcagtgtcgtattcagcacaggtctgataaccggagttgatgacatgtccggtatcatctaacgcgacaaagtaggtttctgctttaccatcacgttgacccaggatgtaggtctggcaagtaccgcgagcatggatcatgctcacttcagacgaaggtttacccgcaatttgtgcaacctgcgcccggctcatgccttttttgacgtctttcaccacaggctgtacaaactggtctttggtacgatcataagccgtacaacccgccagcatggttaataccgccgctgcactcagaattcctgccatattcttgttcatattccgtcctcttgtttatcagcgtgttagataagcctggaatacattgggcgctttttcaagcccgtgaacgaaacggctccgctttcagaggattcctgtatgacgttttaaccaccattcagcccgctgtcgcttgtcgtttcagtagcaacgggttagctttaaggaagttttgtcttttctgtctggaggggttcaatgacattgcaacaacaaataataaaggcgctgggcgcaaaaccgcagattaatgctgaagaggaaattcgtcgtagtgtcgattttctgaaaagctacctgcaaacttatccgttcattaaatcactggtgctcgggatcagcggcggtcaggactccacgcttgccggaaagctgtgccagatggcgattaatgagctgcgcctggaaaccggcaacgaatcactgcaatttattgccgtacgcctgccctatggtgttcaggccgacgaacaagattgccaggatgccattgcctttattcaaccggatcgcgtattaaccgttaatatcaagggcgcggtattggccagcgaacaggcattgcgggaagcaggcattgaactgagcgattttgtccgtggcaatgaaaaagcgcgtgagcggatgaaagcacaatatagcattgcgggtatgaccagcggtgtcgtggtgggcaccgatcatgcagcagaagccattaccggattcttcactaaatatggtgacggcggtacggacattaatccgctgtatcgtctcaacaaacgtcagggtaaacagttactggcggcattagcttgcccggaacacctttataagaaagcgccaacggccgatctggaagatgatcgcccttctctgccagatgaagtggcactcggcgtgacctatgacaatatcgacgactatctggaagggaaaaacgtacctcaacaggtcgccagaacaatagagaactggtatctgaaaaccgaacataaacgccgtccgccaattaccgttttcgatgatttctggaaaaagtaataatttgcacatattggattgtgcgaaaaagagtaatttgttcacgccggatgcggcgtgaacgccttattcgacctataaaactatgcaaattcaatacattgcaggagtcgaataggcctgacaggcgtagcacgtcagacggtgtaacctttgtcatcgacccgcctcttttttaatcgcttcccgcctgttacactggatagataaccagcattcggagtcaacagtggtacggcgtttaacttctccgcggctcgaatttgaagctgcggcaatttatgaatatcccgaacatttacgttcattccttaatgacttacccacccgaccaggggtgtatctgtttcatggtgaaagtgacaccatgccgctctatatcggcaaaagcgttaacatccgcagccgcgtcctttctcatttacgtaccccggatgaagccgccatgctacggcaatcccgacggatcagctggatatgtaccgccggtgaaatcggcgctctgctccttgaagcgcgattaatcaaagaacaacagccgctgtttaataaacggttgcgccgcaatcgccagctctgtgccctgcaattaaatgaaaagcgcgtcgatgtggtgtatgccaaagaggtggatttttcacgagcccccaacctgtttggcctgtttgccaataggcgcgcagctttgcaagcattgcagaccatcgctgatgaacaaaaactttgttatggcctgctgggactggaaccgttaagtcgcggtcgtgcatgttttcgttcagcgctaaaacgttgcgccggagcatgctgcggtaaagagagccatgaggaacatgcgctacgcttgcgccagtctctggagcgtttgcgggtggtgtgttggccttggcaaggggcggtggcgctgaaagaacagcacccggaaatgactcaatatcatattattcaaaactggctgtggctgggggcggttaattcgctggaagaagcgacaacgttaattcggacacccgccgggtttgatcacgacggttataaaattctttgtaagccgctgctttccggtaactatgaaattactgaacttgatccggcgaatgaccagcgagccagttgatttcactgaacaacagtttaccttgcggttgtaaaagccgcagggtgtgcctgccatcgaaccagcacgcgccctggtcggtagtgagcaatttatcgcccagttgccacgccccgttaatcacaaacaccaccccgccgcgtgagccaaaggtagtaaacgtacgttcggcaattctgactttcgccttacagacatccaggcgtgtcatgatgttgaaatccatcgacatctgccctgccgtcagtttcgcttttaccacctggtccgctgcaaaggcaaaaggctggaacggttttaaggtatggttaaagcggtctgcgctttcaaggagcatctcgccgccttccagcaacgtcactatcctttccatgccgggaaacaaagaaaactccccattcgccgcgatggatgcaatgctggcacgccagtaaaaatcacgttttgccggtgggaacgtgcaaatttcgcgcgtttcaccggcagcatttcgccacagattcaccgacattttacgcatatcaaagtattccatactcgctcccggcccgttcttttcattgttatcgttcaggtaaccgtggatggttatcggcaactcgggtgatttacgttagtggtgatcaggctttttttacaactgtttgagaagagaaaagaaaaccgccgatcctgtccaccgcattactgcaaggtagtggacaagaccggcggtcttaagttttttggctgaaagattattcagcagttgcaggcattttaccttttgccgctggacgttctgtcagacgcttctcaaaattagcattaaattgctttttctgttccggcgtcaggatgttgtaaattttgttctgggtttccatgtgcgccagcatgttagctttgcgctgttcttccatttttgcgatctgcgcttcagcttttactttatcgaaggtatcgctggcaatgatgtcatgcattgcgcggcgttcttccagcggcggacgtttcatctggtcacgctggcctttcatgatttcgcggatctgctgtttctgcgcgtcggtcaggttcaggtctttgaacatcatgtcctgatgcggaccgaacttgcctttgtggtgcatcatcggcttcgcgtcagccggtgctgcggtagtggtgtctgcggcatgggccaggttagccgcgccaagagccagggtagaggcaacaaacagtgcagttaatttacgcatattctatatccttcctttcagttatttattacggctttcttaagtagcgtgccgtgttgacgagattaactttactgactttagcgtcaattaatcagagcaacggtaaaacaatgaaagtgtaaaaaacacttttgcgccaattatggagaaaaaaagaaaatttgatggagagtgatgagagaatattacaacacgatgattttgcagagattatgaagaactataccggatgactggtgataaataaagcaaataaccaggattaatctgtattaatttataagaaagcaacttaatacccgcagaatgatttctgcgggtaagtattagcttattttttcgagcattaatcccgcgcgtaatcccaacgctaccaacggattagggaataacacatactctacatcatgggttacggtaaaacgttcctctccgtcctgcgccagcaatgttcctttctcaaacggcataaaattcagcgtgtcacttgccatatgcatttcgaaggacggcgagtggcgagtaatttgcgaaaccacccgataacggagcggcggtgttctcacgataccgacactctcaccagatagcagcgcagcaattgcgctggcagttactgcaaactggcgaagatcgttttgcccaaagggcaacgctttgccaagttccagcgtacaggccagcgcgccaaaatgtctggcgctgaaatgggtaaacgtaccaccaggttcctgatggaacaccagcgcctccagccccgccgcacccagccacgtcagaaatttctcgtcccagggaatgtcgcgttgcggtaatacaccgaactgcggatgcaaggagccacgaattgcggtatgtagatcaaggtgccagcgcacagattctttgccctggtcataaaaatcttccaggcactgttccagttcgcgcgcccgacaggtttctccgctttcagcaaatagctgccaacgaccgccaaacattcgattcatatcgctatggcaataacgtttcccttgcttcagcgcaggaggattcccgaggatcaccagcaaccgccaacgtaacgggatctcgccgtgagatatcgcgccaagcaacgcgtccagcatctccacaggtgccgtctcattaccgtgtattcccgctgaaatcaccagtgcgccttgcggtggcgttaatggcgtcagttccagcacaccatcgcccagccagcgccagcgaacgccgttgatttctcgctcggtgataaccggttttttacccgttaaggtcagagcaagaaaattatccattgccccctccctcgcgctggaacggataaaccgaaccgagattcagtaattggctcaatacatccagtgcttcccgcccttcgcgcagcaattgcgggtcggccagatcggcagcagtaaggcgatcgcggtagtaacgatccacccagtcattgagcgcattaaacagcgtatcgttcatcatcaccgccggattcaccgcccggcgttcttcttctgtcaataccacccgcaaccgcaggcacgccgggccgccgccattcgccatgctttcacgtaaatcaaagacttttagttcgctaatcgggttgtcagcggcaaggagttcattgagataaccccatactccggcgtgttcccgacactcctgaggcagcaccaacatcatggaaccatcatcgcggctcagcagttggctgttaaacagataggtagacaccgtatcagacacggaaacctgagttgccggaacttctatcgccataaaaccattgacccgcgcacgcaggtttgccagtaactgtgactggcgagcgaacgcctgttggtggcaaaacagcacctggcggttactcacggcaatcacgtcattatgaaaaacgccctggtcgataacgtccgggttttgctgggcgaaaatcacctgttggggattcacctgattcagccttgccaccgcctcgctggcttcgcgagtctgtcgcgccggataacgggaaggccgggtatcattgccttcttctcgcccgtagacaaaaagttgcatacccggttcaccgtaatgaccgccgagacgattgtggtttgccgccccctcatcaccgagcaacgctacctgtggcaacgccgaatggacgctaaatttctcttcgtcgttaaaaatcgcttttaacagcgattcagtgacgggcgcttccagcgaacggtgaaatttattgttcaggttggcaacggtgagatgcactttgccatccagcgtatcggcagatggcgcgatcgttgccgcattggctacccacattggcgaagcggaactgacgctggaaagccagtgcggtgcctggcgtgcaactttttccagtacctgctcatcgctaccactgaatcccaactgacgcagcaccggaataaacggacgctcgtgcggcgggatcacggcctgggggaatcccgcatcggcaagggctttcattttcagtaagccctgcttcgccgccagtcgcgggttagacacctgaaaacggtgacgggtagaggcttcattaccaaacgacaggcccgcgtaatgatgcgtcagccctaccagcccgtcgaaattgacttcccaggcgttcatcgcaccacctcatcggaaaaatccagcccggggttaagcgtggcgggcaatgttaacgagtccgactccaggctcgccatcggccatgcgcagtaatctgcggcataccaggcgctggggcgatggttaccggaagcaccaatgccgccgaatggcgcggtactggcagcaccggtaagcggtttgttccagttaacaatccccgcccgcgcctccagcaacagttgatcgaacttttcccgctcgggggaaaccagaccgcaagagagtccgaagcgagtgttattcgccattcgaatcgcttcatcgaaagtatcataacgccagacgcgcaataacggtccgaacacctcttcatctggtacgccagcaacgcctgtcatttcaatgatccccggcgtcagcaacgatgtccctgcttgtaataagcgcggcgcaagcaggggtcgtccgcccatcgcttccagttgctgccatgcagtaaccacctgctgtgcggcctgttcagaaatcagcccgccaataaacggctgcggttcgtcatcccagttgcccggcgttaatcgctggctgacggcaaccagacgagcaagaaacgcatcgccctgcgccccgcttttcagcaataaacggcgggcgcaggtgcagcgttgaccggctgtgacaaacgccgactgaatggtcagatggacagccgcgtcgatatccgccacctcatcgataattagcggattattaccgcccatctcaagggcgagaattttctccggctgaccggagagctggcgatgcaactggtagcctgtattggcgctaccggtaaacagcaaaccgtcgagatcctccagcgcactcagcgcctgacccgtttcacgcccgccctgcaccaggttcagcacgcctggcggcaagccagcctgctgccataaacgcattaccgcttcgccactccacggtgtcagttcgctgggtttaaagataatggtgttacctgccagcaatgccggaacgatatgtccgttcggcaaatgaccagggaaattatacggcccaaacaccgccagcacgccgtgcgggcgatgtcgcaggctcgccgcgccgtccggcatttcactacgctgctcgccggtacgaacgtgatacgccttaattgatatcgcgattttattgatcatcgccgtcacttcggttgccgcttcccagcgcggcttacccgtttctctggcaataatcgcggttaattcggctttattgctttccagcagtgcggcaaagcgttcgacaacggcatgacgttcagcaaatgaaagccgcgcccagcgcggaaacgccgcacgggctgcccgacaagcctgctcgacctgagcggcatcggcatcattgccttgccataacacctcgcccgataccggattacgcttcacacgcgatgcgccctggcccgttatccagtcaccgttaatccataaagtcatgctgttttctcctctgcgcacaggcgcaccagacgaacgcgatccccggcgtggcatttgagggcatccagttgtgcggcggttaaaatcaaacgctcggttgccggatcggtacgcaccagcaccacgcggaaatggtgataattttcattggcgaccaggcaggctgggaaatcgccctgcgcaggctgcccttctgccacttccaccagccgacttttacggatggcgcgcacgcggtcgatgtcacactcaagcgtcggcccaccgtcaaagatgtcgatatagttacggtagcgaaaaccttctttctccagcaccgcgcgggcaggcgcggtttgcggatgtacctgaccgatgacgtcctgggcttcctgggataaaaagtgggtatagatcggatgtttcggcatcagttctgcaataaatgccttttgcccggtgccgcagagaaaatcggcgcggctaaaatccatcgaaaagaagcgtttaccgaggctttgccagaacggtgaatagccgtgttcgtcaatcaccccgcgcatttcagcaaccactttgtcattaaacttgtcgcgaaaagccgccataaacataaagcgcgatttcgacagcaaatagccgttgccctctttgcgccagtccgggtcgagaaacagcgtgcacagctcgctgctgccggtgtgatcgttactgagaaacagcgtcggcaatgcgttatagacattcagctcttttgaggcgtgaaccaacgtgccgacgcgatagttgtaccagggatcgttcagcccaaccgccacctcaatggcacaaatccccgccacggtgcctgtctcgctatcttccagcacgaacacatagccctgctcacttttgggcagttcgccttgccaggttttgattgccctttcgatacgcgccgaaagcgtggcttcattggcgggaagcgacgtcaggccgccgcccgttttgctggcaagctgcatcagcgccgagacatctgatcgctcaacgggacggatgaccatcatgatgaacctcggctaacaaagtgttcgcaagcagctgcaaagcgatccagtccggtcgtcacctcttcttcgctgacattgagcgcaggcgcaaaacgcaccacgttgccacccgcaatcagtaccatcacgcctgctttcgccgcttcctgagagatctgtttcgcttgcccggcgtaatcggcattcagtacacagccaatcagcaaacctaagccgcgaacttcactgaacaaaccatagcggtgattaatagtattaagacgctcaacaaaccagtcgtgacgctgtttaacgccattaagcatctctggtgtgttgatgagctccagcactttgcctgccaccgccgaggccagcggattaccgccataggtggtgccatgagtgccaacggtcatcacgcgggcgcactcttcggttgccaacaacgcaccgaccgggaaaccgccgcccagcgctttggcggtagttaacagatcaggcgtcacgccgtagtgcatataggcatacagttccccggtgcgcccgacgccggtttgtacttcatcaaaaatcaacagcgcattgtggcggttacacaattcacgcagaccttgtaaaaacgcgttgctggctggcaccacaccgccttccccctggatgggttcgacaatcaccgcacaggtagagtcgtcaatcagcgcgctggcagagttaatatcgttatatgcagcatgacgaatatccgccggcagtggcgcaaaatcctgtgaataggctggctgcccacccgcactgacagtaaacagcgtgcgaccatgaaacgcatttttgaacgccacgatgccgctcttatggctgccgtagcggtcgtgagcgaatttacgcgccagttttagcgccgcttcgttggcttccgcaccggagttacaaaagaagacgcgatcggcaaacgtggcgtcgatcaattttttcgccagtcgcagtaccggctcgttggtgtaaccgttgccggtatgccagaacttactcgcctgttcgttcagcgcttcacgcagttccggatgcgcatggcccagcgcgttcaccgcaatgccacccgcgaagtcgatatactctttcccctgctgatcccacaagcgcgaaccttcgccacgtaccggtataaagggtgccggagcgtaaacaggtatcatccattcatcaaagttttcacgcgtaattggctgagacatagcgacctctacagtaaataattcgttatttatatgttaataataagtaatgtttgcgctgtaaatgtagattgcagggttcgtgccagccagtgataaaagtgcataaacggcggaggctaactggaaatcaaggagttataaccaaaccatatgcatttaaagtgcatataaagtgaatacgtttgcgatgtgggtgaataaaaagaataaaaaacgcaatgttatgcagaagtaaaatataattctggaattgtgatcattgacgaaatttactggaaattactgcgccattctgacgcagcgcgcaccaaaagcgggcattttttgcgccatcgttgacatcattaacaaccatcgatcaaatcacttaacaacaggcggtaagcaacgcgaaattctgctaccatccacgcactctttatctgaataaatggcagcgactatgaaatttgtctcttttaatatcaacggcctgcgcgccagacctcaccagcttgaagccatcgtcgaaaagcaccaaccggatgtgattggcctgcaggagacaaaagttcatgacgatatgtttccgctcgaagaggtggcgaagctcggctacaacgtgttttatcacgggcagaaaggccattatggcgtggcgctgctgaccaaagagacgccgattgccgtgcgtcgcggctttcccggtgacgacgaagaggcgcagcggcggattattatggcggaaatcccctcactgctgggtaatgtcaccgtgatcaacggttacttcccgcagggtgaaagccgcgaccatccgataaaattcccggcaaaagcgcagttttatcagaatctgcaaaactacctggaaaccgaactcaaacgtgataatccggtactgattatgggcgatatgaatatcagccctacagatctggatatcggcattggcgaagaaaaccgtaagcgctggctgcgtaccggtaaatgctctttcctgccggaagagcgcgaatggatggacaggctgatgagctgggggttggtcgataccttccgccatgcgaatccgcaaacagcagatcgtttctcatggtttgattaccgctcaaaaggttttgacgataaccgtggtctgcgcatcgacctgctgctcgccagccaaccgctggcagaatgttgcgtagaaaccggcatcgactatgaaatccgcagcatggaaaaaccgtccgatcacgcccccgtctgggcgaccttccgccgctaatttagcagctctcctggctcaaactgggtcaggagaattaaccttgagaaaaatcaacaaactgtcagtaatgatttgttgcctgccgtcctttgttataccgtctctgcgtttttagttgtctgaccacttctctattatcaagtttgatataggaaactccacgatgaacgctgagcgtaaatttctttttgcctgtcttatttttgcgctggtcatttacgctatccacgctttcggtttattcgatctgctcaccgatttaccccacttacagacactcatccgccagagcggatttttcggctatagcctctatattctgttattcatcattgccaccctcttgctgttaccaggaagcatactggtgatcgcgggaggaatagtttttggcccgctcttagggacactactctcattaattgccgccacgctggcctcctcgtgctcattcctgctggcgcgctggctgggacgtgatttactgctgaaatacgttggccatagcaataccttccaggccattgaaaaaggcattgcgcgtaacggtattgattttcttattctgacccgcttaatcccgttgtttccttacaatattcaaaattacgcttacggattaaccacaatcgccttctggccttatacccttatttcggcactcacgaccctacccggtattgttatttataccgtgatggcaagcgatctcgccaatgaaggcattacgctgcgctttattttacaactctgtctggcgggcctggcgctgtttattctcgtccagctcgcaaaactctacgcccgacacaaacatgtggatctgtctgcttcgcgccgcagcccacttactcacccaaaaaatgaaggatagaacgatgttgcaacattattcagtgtcatggaaaaaaggactggctgcactctgtttactggctgttgctgggcttagcggctgcgatcaacaagagaatgcggcggcaaaagtggaatacgacggactttcgaacagccaaccgctgcgtgtcgatgccaataaccatacggtaaccatgctggtgcaaattaatggtcgtttcctcaccgacgacactcgtcacggtattgtgtttaaagatggctccaacggacataaatcgctgtttatgggttatgcgaccccgaaagcattttatgaagccctgaaagaggcaggtggtacgccgggcgaaaacatgacgatggataataaagaaacgactcatgtcacaggcagcaaactggatatttcggtcaactggcaaggggcggcaaaagcgtattccttcgatgaagtgattgttgacagtaatggcaagaaactggacatgcgctttggcggtaatttaacggcagcagaagagaagaaaacgggttgcctggtgtgtctggatagctgcccggtcggcatcgtcagcaatgcaacatacacttatggtgcggttgaaaaacgtggtgaagttaaattcaaaggcaatgcctcagttctcccggcggataacacgctggcaacggttacctttaaaatcgccgaataaagccaggataaaggatgatgatgatgcaatcgcgaaaaatctggtactaccgtataaccctcatcatcctgttgttcgctatgctgctggcatgggcgctgcttcccggcgtccatgagtttatcaatcgcagcgttgcggcgtttgccgccgtggaccaacagggtatagaacgctttattcagtcttacggcgcactggcggcagttgtctcgttcttgttgatgattttgcaggccattgctgcaccgctacctgcgtttttgatcacctttgccaatgcgtcgctgtttggcgcgttctggggcggcttgctgtcgtggaccagttcgatggccggcgcggcgctgtgcttttttatcgccagagtgatgggccgcgaagtggtggaaaaattaaccggcaaaaccgtgcttgacagtatggacggctttttcactcgctacggcaaacacaccattctggtctgtcggttattgccttttgtccctttcgatccaatcagctatgctgccggtttgacttcaatacgttttcgctcgttttttatcgccaccgggcttggtcagttaccggcaactattgtttattcctgggcgggcagcatgttaacaggcggtactttctggtttgtcaccggactgtttattctgtttgccctgaccgtggtgatttttatggcgaagaaaatatggcttgaacgccagaagaggaatgcctgatgggtttaccgccgcttagcaaaattcctttaattttacgtccacaggcgtggctgcatcgtcgccattacggcgaggtgctaagccccattcgctggtgggggcggatcccgtttatcttttatctggtgtcgatgtttgttggctggctggagcgcaaacgctcaccgctcgatccggtagtacgatcgcttgtcagcgcgcgcattgcgcaaatgtgcctgtgtgagttttgtgtggatatcaccagtatgaaagtcgccgagcgcaccggcagcagcgataaactgctggcagtggctgactggcggcaaagcccgctctttagcgatgaagaacggctggcgctggagtacgccgaagccgcaagcgtaacgccgccaacggtcgatgatgccctgcgtacccgactggctgcgcattttgacgctcaggcgctcaccgaactgacggcattgatcggcctgcaaaatctgtcagcccgttttaattctgccatggacattcccgctcaggggctgtgccgtattcctgaaaaacgttcttaaggagagatgatgcgccattgtgggtggttgctgggattgttatcgctgttttctctggcaacacatgccagtgactggcaagaaattaaaaatgaggccaaagggcaaaccgtctggtttaacgcctggggcggcgataccgcaattaaccgctatctcgactgggtgagcggcgagatgaaaacccattacgctataaacctgaagattgtccgtctggcggatgccgcagacgcggtgaagcgcattcagaccgaagccgcagccggacgtaaaacgggcggctcggtggatctgctctgggtgaacggcgaaaacttccgcaccttaaaagaggccaatttattacaaacgggctgggcggagactctgcccaactggcgctatgtcgacacacagctgccggtgcgggaagatttttctgtgccgacacaaggtgcggaatcgccctggggcggcgcacaactgacgtttatcgcccgccgcgatgttacgccacagccaccacaaacgccgcaagccttactggagtttgctaaagccaatcccggcacggttacctatccgcgcccaccggactttaccggcacggcgtttcttgaacagttgctgattatgctgacgcccgatcccgccgcattaaaagaagcgccggacgatgcgactttcgcccgtgtcactgctcccttgtggcaatatcttgatgtgctgcatccgtatttgtggcgcgaaggaaaggatttcccgccttcacccgcgcggatggatgctctgctgaaagccggcacattgcgcctgtcgctgacctttaaccccgcgcatgcgcagcaaaaaatcgccagcggcgatttgcctgcaagcagttacagttttggctttcgcgaggggatgattggcaacgtgcatttcgtcaccattcctgccaacgcgaatgccagtgctgcggcgaaggtagttgccaatttcctgctctcacccgatgcgcaactgcgtaaagcagatcccgctgtctggggcgatccttctgttctcgatccgcaaaaactgcctgacgggcagcgcgaatcattgcaatcaagaatgccgcaggatctgccgccggtactggctgaaccgcacgcaggttgggtaaatgcgctggaacaagaatggctacaccgttacggtacgcattaatctttttgctgtgggcgatggtggcggtgatttatgcaccgctgatcccggcagctctcacgctgatatcgcctgctttgtcgttgacacactggcaggcgttatttgccgatccacagttaccgcaggcattactggcaacgctggtgtcgacaaccatcgcggcggtcggggcattgttgattgccctgctggtgattgtggcgctgtggcctgggccgaaatggcagcgtatgtgcgcccgtctgccgtggctgctcgccattccccatgtggcttttgccaccagcgcccttctgctctttgctgacggagggctgctttatgactatttcccgtatttcactccgccaatggaccgatttggcatcggtctgggcctcacccttgcagtgaaagaaagcgcatttctgctgtggatcttagcagcagtattgagcgaaaaatggctgttgcagcaggtcattgtgctggattcgctgggctacagccgctggcaatgcctgaactggctgctgttgccctccgtcgcgcctgcgctggcaatggcgatgctggcgattgttgcctggtcgctgtcggtcgtggatgtggcaattattctcgggccaggtaatcccccgacgctggcggtaattagctggcagtggttaacccagggcgacattgaccaacaaacaaaaggcgcgcttgccagcctgctgttgatgctgttactcgccgcctacgttttgctgagctatctgctatggcgcagctggcggcgcactattccccgcgtagatggcgttcgcaagcctgccacgcctttattgccgggcaatacgctggcgatttttttacccttaaccggtgtgctgtgtgtggttctgctggcgatcctcgcggatcagtcgacgatcaatagtgaagcgctcatcaacagcctgacaatggggctggtggcgacattcatcgctttgctcctgttactgctgtggctggaatgggggccacagcgtcgccagttgtggctatggttgcccattttattacctgctctgccactggtggcgggccagtacacgctggcgctatggctgaaactggatggaagctggacggcggtggtctgggggcatctgctgtgggtgatgccgtggatgctgtttatcctgcaacccgcctggcagcgcattgattcacggttaattttgattgcgcaaacactgggctggtcgcgggccaaaatcttcttttacgtgaaatgcccactcatgttgcgccctgtgctgattgccttcgcggtgggatttgcagtcggtattgcgcagtatatgccaacgctgtggctgggcgcggggcgttttccgacgctcaccactgaggcggtggcattaagcagcggcggcagcaacggtattctcgccgcccaggctttatggcaactgctattaccgcttattatttttgccctgaccgcgttagtcgcaaaatgggtaggttatgtcagacaaggactccgctaatgctctgcgtgaaaaatgtttcgctacgtttaccagaaagccgcttgctgacaaacgttaactttacggtggataaaggtgacattgtcacgttaatggggccgtctggctgtggaaaatccactctgttttcatggatgattggtgcactggccgaacagttttcttgtacaggtgagctatggctcaatgagcaacggattgacatcctacccaccgcacagcgtcagattggcattctttttcaggatgcactgttatttgaccagttcagtgtcgggcaaaatttactgctggcgctaccggcgacacttaaagggaatgcccgacgtaatgccgtgaatgatgcacttgagcgttcaggccttgagggagctttccatcaggatcctgccactttgtctggcggtcagcgagcgcgcgttgctctactacgcgcccttctcgcccaaccaaaagcgttactcctggatgagccattcagccgtcttgatgtggctctgcgcgataattttcgccagtgggtgttcagcgaagttcgcgccctggcgatccccgtcgttcaggtaacgcacgatctccaggatgttcctgctgatagttctgttctggatatggcgcagtggtcagaaaattacaacaaactgcgataacgcaaagtttttctcaatgcgtcagttcagaatggcgcactcaaaactacaatgtcgggattttcgatgaaacgtgtttctcaaatgaccgcgctggcaatggctttagggctggcttgcgcttcttcgtgggccgctgaactggcgaagcctcttacacttgaccagcttcaacaacaaaatggcaaagcgatagatactcgccccagcgcgttttataacggctggccacaaaccttaaatggcccttctggtcatgaacttgccgccttaaacctctctgccagctggcttgacaaaatgagcaccgaacagctcaacgcgtggatcaagcaacataacctgaaaaccgatgctccggtggcgctgtacggtaatgacaaagatgtcgacgccgtcaaaacgcgactgcaaaaagcaggtttaacgcatatctccatcctgagtgacgcgctaagcgaaccttcccgtctgcaaaaactgccgcattttgagcagctggtttatccgcaatggctgcacgacctgcaacaaggtaaagaggttacggcgaaacctgccggtgactggaaagtcattgaagcggcctggggcgctcctaagctttaccttatcagccatattcccggcgctgactacatcgataccaacgaagtggaaagtgaaccgctgtggaacaaagtttctgatgaacaactaaaagcgatgctggcaaaacacggcattcgccatgacaccacggtcattctgtatgggcgtgacgtatacgctgcagcgcgtgtggcgcagattatgctttatgctggcgtgaaagatgtgcgcctgctggatggcggctggcaaacctggtccgacgcgggactgcctgttgagcgcggaacgccaccgaaagtgaaagcggaaccggatttcggcgtgaagatcccggcacaaccgcagttgatgctcgatatggaacaggcccgtggactgctgcatcgccaggatgcatcgctggtgagcattcgttcgtggccagaatttatcggtacgaccagcggttacagctatattaaaccaaaaggtgaaatagccggcgcacgttggggacacgctggtagcgactcgacgcatatggaagattttcataacccggatggcaccatgcgcagcgccgatgatattaccgctatgtggaaagcgtggaatatcaaaccagagcagcaagtttcattctactgcggcaccggctggcgcgcgtccgaaacctttatgtacgcacgcgccatgggttggaagaatgtttccgtgtatgacggcggctggtacgaatggagcagcgatccaaaaaatccggtagcaaccggtgaacgcggcccggacagtagcaaataacattgcaattactgacgctggagcgacttcagcgtcagatacccactccacacccgcgtaaaggtcgtcatccagcacaacgcaccgaagatccacgcaaaccacgcaaaccatgcagggaataaacatcccagcacaaacagtaagatcgtttctgtgccttcggttaatccccccagatagtaaaacgacttatgtgcataaccggggttatcaatctgatgttttgctgccagtgcagcaaaggcgagaaaactgctgcccgtgccgataaacgcaaacaacaaccagccgcctgccagcgcattttgctccggtgcagcaagaataaagccaaacggcaccagcgcgtaaaagagaaaatcgagagaaatatcaagaaagccgcccgcgtcggtaagctctctgcgccgcgccagcgcaccgtccagaccatcaagcagcctgttcaacaaaatgacgactagcgccgccagataccagcccagcgccagaaacggcagagccagcacgccgatggcaaatcccactaatgttaaaccatctggcgtaatgcccggtttatcaagaacccgcacgcactgatgcaacaacggtttaatccggggatgaagatggcggtctagcacaggcactccttaaatataaagcctttctgattgagcaacagtgcggatattatggcatttttcgcttatctgcccgtgtgtaatttatgaaaatgattgaagttgttgccgccatcattgaacgtgatggcaaaattttactcgcgcaacgccccgcccagagcgatcaggcgggattatgggagtttgccggtggtaaagtcgagccggatgaaagtcagcggcaggcgctggtgcgtgagttacgcgaagaactgggcatcgaagcaactgtgggtgaatatgttgccagccatcagcgagaagtttcggggcggattatccatcttcatgcctggcacgtacccgacttccacgggacgttacaggcacatgaacatcaggcgctggtctggtgctcacctgaagaggcgctgcaatatccgctggcccctgctgacattccattattagaggcgtttatggctttacgcgccgccagaccagcggattagtgctaagggttttgtcatcacgctggcattgcagcagtattccttcggctttaattaccgccccttcagaataattttgatcctgataaacgcagcactgagtacagggctgcgctgactgcccgcctgaactgaacacttctggcggtacgtttacctccacgtccggacgataatgcgggttagccagtgcaattaatggaaatgctaatactacggcgaacaatgctcgactcacagggaactccttaacgttattgtctctgctactgataacggtagccgggtggcaaaactttagcgtctgagttatcgcatttggttatgagattactctcgttattaatttgctttcctgggtcatttttttcttgcttaccgtcacattcttgatggtatagtcgaaaactgcaaaagcacatgacataaacaacataagcacaatcgtattaatatataagggttttatatctatggatcagacatattctctggagtcattcctcaaccatgtccaaaagcgcgacccgaatcaaaccgagttcgcgcaagccgttcgtgaagtaatgaccacactctggccttttcttgaacaaaatccaaaatatcgccagatgtcattactggagcgtctggttgaaccggagcgcgtgatccagtttcgcgtggtatgggttgatgatcgcaaccagatacaggtcaaccgtgcatggcgtgtgcagttcagctctgccatcggcccgtacaaaggcggtatgcgcttccatccgtcagttaacctttccattctcaaattcctcggctttgaacaaaccttcaaaaatgccctgactactctgccgatgggcggtggtaaaggcggcagcgatttcgatccgaaaggaaaaagcgaaggtgaagtgatgcgtttttgccaggcgctgatgactgaactgtatcgccacctgggcgcggataccgacgttccggcaggtgatatcggggttggtggtcgtgaagtcggctttatggcggggatgatgaaaaagctctccaacaataccgcctgcgtcttcaccggtaagggcctttcatttggcggcagtcttattcgcccggaagctaccggctacggtctggtttatttcacagaagcaatgctaaaacgccacggtatgggttttgaagggatgcgcgtttccgtttctggctccggcaacgtcgcccagtacgctatcgaaaaagcgatggaatttggtgctcgtgtgatcactgcgtcagactccagcggcactgtagttgatgaaagcggattcacgaaagagaaactggcacgtcttatcgaaatcaaagccagccgcgatggtcgagtggcagattacgccaaagaatttggtctggtctatctcgaaggccaacagccgtggtctctaccggttgatatcgccctgccttgcgccacccagaatgaactggatgttgacgccgcgcatcagcttatcgctaatggcgttaaagccgtcgccgaaggggcaaatatgccgaccaccatcgaagcgactgaactgttccagcaggcaggcgtactatttgcaccgggtaaagcggctaatgctggtggcgtcgctacatcgggcctggaaatggcacaaaacgctgcgcgcctgggctggaaagccgagaaagttgacgcacgtttgcatcacatcatgctggatatccaccatgcctgtgttgagcatggtggtgaaggtgagcaaaccaactacgtgcagggcgcgaacattgccggttttgtgaaggttgccgatgcgatgctggcgcagggtgtgatttaagttgtaaatgcctgatggcgctacgcttatcaggcctacaaatgggcacaattcattgcagttacgctctaatgtaggccgggcaagcgcagcgcccccggcaaaatttcaggcgtttatgagtatttaacggatgatgctccccacggaacatttcttatgggccaacggcatttcttactgtagtgctcccaaaactgcttgtcgtaacgataacacgcttcaagttcagcatccgttaactttctgcgatagcagcagatatgccagtaaagaaatcccatttgactatttttttgataatcttcttcgctttcgaacaactcgtgcgcctttcgagaagcaagcattatataatgccaggccagttcttcttcaattgtcccgttttgaaaagctgtgcttgatatcgagatcatccatgataattccgccgcccatattagcttcgccgaggatttaccggagctatgattagcgcaatcagagatatagtctgagggaaaaacagcaaatttattcaacaaggcgataacctgctctggggcttcctccatgtttgctttaaaggtattggctccatggtcgccagaaagaaaatgctccattaaggcacaataactttcgctatcttcgataccccattgatcctctaaagactcgcgtcttttacttatgatatcgatcgagtcaaaaggaagcacatgatattggaaggtatctttgccaggttcaggctttcgcggccagaactccagcgtttcagaccattgcttatgatagaatcgataaggtgcgatcaattgtagcgcctgtaacttctcgatactgagcggctcaatacctttagcctgataataatgcagttgttctttttttgctttaaaaccggcccgaacaataagccccatcataattaatagataaagaaaagagcatcccgcggtaatcaggcctctttcattcaaaccgttggatgttatcgctgcgaacacaaacattacagcgacaacacatgttaaataaaacccccacttacaaagcagcatggccttattttctttaatcatccgttcaaaattactattaaatatttcccagccattaaaagaatacttctcgctcccaggatggttttgtaataaaacttttttcatcacattccctgttattacatactttagaggcgataattttatccatgcaaaaaaaatatccaacgaattttcttgatccgctggatatttcagaatatgactcgaatagcacgaaagattcactcgcttacgctatcgccccgcttccgacttcatctgctggcggactttttttcgcactacgtttacgcggtgcagcctttttcttatcagcactgccaccactgcccggagccacaatgccgcgaaactgccgcaccggcgtacgtttggcttgatcaataagctgatatagcgtccccaccagcggctgcataaagtcctgatagcgacactgcttttcgctgatttgcgtcagcaccgattcccagtgcgcggtcatgtccggtcgcgtcgccatctccggcagcgaatggaatagcgcttttccggcgtcggtggagtggatatagcgcccttttttggtcaggaaaccacgcttgaacaacagttcaataatcccggcacgcgttgcctctgtccccagaccatcggtcgcacggaggatctttttcagatctttatcctgcacaaagcgcgcgatcccggtcatcgccgaaagcagtgttgcatcggtaaaatggcgcggcggctgggtttgccgctctaccacttcacctttttcacacagcaactcatcgcctttcgccaccacaggcagtggcgtgccgtcgttttcttcatcgcgctctttgctgcctaacagcgtgcgccagcctgcttcagcaagaaaacgcgctttagcgacaaatttgcctttggcaatgtccagttcgataacacacttgcggaacaccgcatccgggcagaattgcatcagatactgacgggcaatcaggttatagaccttcgcttcgttctccgtcaggttgatcgcagaactccgtgcggtcggaatgatggcgtggtgcgcatcgacctttttgtcatcccaacagcggttgcgtatatctggatctaccactggctgcggcaacagatccggtgcatgaacactgatggcattcatcaccgcgtggcgtccggcaaaatgttcttctggcaaatagcgacaatcagaacgcggataagtgattagcttgtgcgtttcgtacagtttctggcagatatcaagcacgttctgcgcactcagaccaaaacgttttgccgcttcaatctgcaacgctgaaagcgaaaaaggcagcggcgcggattctgattcccgtttatcgttatagctggtgacaatagccggttgaccactaatgcggttaaccacatgctccgccagtggacgatgtaacaagcgcccttcttcatcctggtacggttcacacgcttcgctcggttgccagatagcggtaaaccgctcatcggcaggtgtcacgatatgtgctttgacttcaaagaagtctttcgccacgaagttttcaatctcttcatcgcggcgcaccaccagcccaagcacgggcgtctgcacgcgtcccacggaaagtacgccctgataaccggcattgcgaccgagaatggtatacgcacgggtcatattgatgccgtacagccagtcggcacgcgctcgcgccagcgcagaaacgcacagcggtacaaactcactgttggaacgaagacggtcgatcgcccgctcaaccgcctgcgggttcaggtcgtttatcaagcaacgctgtacctgctggcgcttttccggtgccagttgcagatagtccagcacttcatccaccagcaattgcccttcacgatccgggtccccggcgtgaacgatttcgctggcttcatgcaggaaccgtttgatgacgttaagttgtttggtcacggagggtcggggctgtaattgccacttttccgggacaatcggcaaatccgcaagattccagcgcgcatagcggctgtcgtaggcgtctggctgcgcctgctcaagcaggtgaccgatacaccaggtcaccacctgaccattaccgcactcgataaagccatcgcctttccggtgcggtttgggcaggacatcagcaatggcgcgcgccagactcggtttttcggcaataaacaaccgcattgaattaacgaatctcaaccatggcacgaccgccgcgcgctggcaccagttcgccaattgccgtcagttcaatgccaaactcggcggctgtagctttgacctcattttctgcttccggcatgaccgccagcagcaaaccgccagaagtttgcggatcacacagcagatcgcgcacttcacgcggcatttcacccatcagatgaccgtagctggcaaagttacgttcagtgccgccaggtactgcgcccaacttaatgtactcttcaacaccggggagtttcgggatcgcttcatagtcgacgcgtgcctgcacaccagccccctgacacatttcgctcaagtggcccagcagaccaaagcccgtaacgtcggtcatcgcttttacgccttcgatgttggcaaaggacgcgcctgcgatgttcatccggcacatcacttccgtcgccagtccctgatgttctggtttcaacagtgattttttctcagccgtggtaagaacgccgatccccagcggtttcgtcaggaacagtttgcatccggcttgtgcggtactgtttttcttcacccgctcggtcggtacgatccccgttaccgccagaccaaaaatcggctccggcgcatcgatggagtgaccgccagccagcgcaatacccgcctgacgacatgcatagcgtccaccttcggtcacttcgcgggcaatttctggggaaagtttgttaatcggccagccgaggatcgcaatcgccataatcggtttgccccccatcgcgaagatatcgctgatggcgttagtcgccgcaatgcggccaaaatcgaaaggattatcaacgatcggcataaagaagtcggtggtactgataacgctggtgccattgcccagatcgtacaccgccgcatcgtcgcgggtttcattacccacaagcaaattcggatcaacaaacttcgcctgctcactatgcaggatggtttccaacacttttggggaaattttacagccgcaaccagctccgtggctgtattgggtcaaacgaatcgagttctcgctcatggacatctcctgtcaatgcaatccgggtatggtaaccctcattccgtgaagtgataagtgagagtgtctgaattcctgcgcctttgctcacaatccagacagtttcgcgacaattatcagaaataagttacaaacggcgtcgggtccgggacgttaatcgacgtagatgctttcagctgcggcgtaccgaggtagagaaaaccgacaattttatcctgctcacggcaaccgaatgcttcacgcactaccggactttcagttaatgcgccactgcgccagatgccgccaaacccctgggcaactgctgccatttgcatcgccatgaccgcgcatccggcagacatttcctgttcccagcgcgggactttatgattctcttcgcatttcgccaccaccgtgatgatgagcggtgcgcggaacggcgcattacgggctttgtcgatagctttgtcatcactaccggcagcaatcgccccctgttccagtacggcgctgaaacgctcgcgcccttccccttcaatcacaaaaaaatgccacggttgcatggacttatggtccggcgcacgcatacccgcacgcaggatgttttgcagttgttcacccgttggcgcgggttcagccaagcgggaggcgctacggcgattgatcaatagttcgagtgcatccatttgattaactcctgtcgtgatatttattcacaaaattaacacgagagtggattttgttacagcacagtccgcaattcctgctgacaagtaccggttgggtcattacgataaccacatctattgcgcctgtgacaggtgtgaccttaagttgggagaatacatgcgaaccctttggcgatttattgccggattttttaaatggacgtggcgtctgctgaatttcgtccgtgaaatggtacttaacctgttctttattttcctcgtactggttggtgtggggatttggatgcaggtcagtggtggtgattcgaaagaaacggccagtcgtggcgcactgctgctggacatttctggtgtgatcgtcgataaacccgacagttctcagcggtttagtaaattaagccgccagctgcttggtgccagttccgatcgtctgcaggaaaactcactgtttgatatcgtcaacactattcgccaggcgaaggacgaccgcaatatcaccggtattgtgatggatctgaaaaacttcgcaggcggcgaccaaccgtctatgcagtacatcggcaaagctctgaaagagtttcgtgacagcgggaaaccggtttatgccgttggcgagaactacagccaggggcaatattatctcgccagtttcgccaataaaatttggctgtctccgcaaggcgtggttgatctgcacggctttgccaccaacggtctgtactacaaatcgttgctggataagctgaaagtttccacccatgtgttccgcgtgggtacgtataaatctgccgttgaaccgtttattcgtgatgatatgtcaccggcagcccgcgaagctgacagccgctggattggtgagctgtggcaaaactatctgaatactgttgccgctaaccggcagatccctgctgagcaggtattccctggcgcgcaagggttgcttgagggtttaaccaaaaccggtggcgataccgcgaaatatgcactggaaaacaagctggtcgatgcactggcatcgagtgcggaaatcgaaaaagcactgaccaaagaattcggctggagtaagactgataaaaattatcgcgccatcagttattacgattacgcattgaaaacgccggcagataccggtgacagcatcggtgtcgtctttgctaatggcgcaattatggatggcgaggaaactcaggggaatgttggcggtgataccactgcggcacaaatccgcgacgctcgccttgacccgaaagtgaaagcgattgtcctgcgtgttaatagcccaggcggcagcgttaccgcgtctgaagtgattcgcgctgaactggcagcagcccgggcagcgggtaagcctgtggttgtatcgatgggcggcatggcggcatctggtggttactggatttccacgccagctaattacattgtggctaaccccagcaccctgaccggttctatcggtatcttcggcgtgatcaccaccgtagaaaatagtctggattcgattggtgttcatactgatggtgtctcaacttcaccgctggcggatgtttctatcaccagggcactgccgccggaagcgcagctgatgatgcagttaagcattgagaatggctataaacgctttatcacgctggttgctgatgcgcgtcattcgacgccggagcagattgataaaattgcccagggccacgtctggaccggtcaggatgcaaaagctaacgggctggtcgatagtctcggggatttcgatgatgcggtcgccaaagcagcagagctggcaaaagtgaaacagtggcatctggaatattacgttgatgaaccgaccttcttcgacaaagtgatggacaacatgtctggttctgtccgggcaatgttgccagatgcgttccaggccatgttacctgcaccgctggcctcggtagcctctaccgttaaaagtgaaagtgacaagctggccgcgtttaatgacccacaaaaccgttatgcgttttgcctgacctgcgccaacatgcgttaagtcttgtactgagtggccgacagatcgtcggccacattattttttacgtcgacgaatcctcttcccgctgtttcgccccatatttccttatccgcatagtatcaggtgcgctccccctgcctcacgtatatacttttgctctttcgatatcattcatatcaatatcatgcaaaagaaatcaatttacgttgcctacacgggcgggaccatcgggatgcagcgttccgagcagggttatataccggtgtcaggtcatctacaacgccaactggcgctgatgccggaattccatcgcccggagatgccagatttcaccattcatgaatatacgccgctgatggattcttcagatatgacgccggaagactggcagcatattgctgaagatattaaagcgcactatgacgactatgatggttttgtcattctgcacggcaccgacacgatggcgtataccgcctctgcgctgtcgttcatgctcgagaatctcggtaaaccggtcattgtgacagggtcacaaatcccgctggctgagttacgctctgacggacaaattaatctgctgaatgcgttgtacgttgcggcgaattatccgatcaacgaagtaacgctctttttcaataaccgattgtatcgcggcaaccgcactaccaaagcccatgccgatggttttgatgcgtttgcctctccaaaccttcctccgttactggaagcaggtatccatattcgtcgtttgaatacgccacccgccccgcacggtgaaggggaattaatcgttcatccaatcaccccacaaccaattggcgtagtgacgatttatccagggatttctgctgacgtcgtgcgcaattttctgcgccaaccggtgaaagcattgattctgcgctcctatggcgtgggtaatgcgccacaaaacaaagccttcctgcaggaattacaagaagccagcgatcgcggtattgtggtggtcaacctgacacaatgtatgtccggtaaagtgaacatgggtggttatgccaccggtaacgccctcgcccatgccggcgtaattggcggtgcagatatgactgtagaagccacgctaaccaaactgcattacctgcttagccaggaactggatactgaaaccattcgcaaggccatgagccaaaacctgcgcggcgaactgacgccggatgattaaggagactgtaatgccccctcgcgccctgttactggtcgatttacaaaatgatttctgtgctggtggcgcgctcgccgtgccggaaggtgacagtacggtggatgtcgctaaccgcctgattgactggtgccagtcgcgcggtgaagcggttatcgccagtcaggactggcacccggcgaatcacggcagttttgccagtcagcacggtgtagagccttatacgccaggccaactcgacggtttgccacaaaccttctggccagatcactgtgtgcagaacagtgaaggcgcacaattacatccgttactgcaccaaaaagcgatcgcagcggtgttccataaaggcgaaaatcctttagttgacagttacagtgccttttttgataacggccgtcggcagaaaacctctctcgatgactggttacgcgatcatgaaatcgatgaattgatcgttatgggcctggctactgactattgcgtgaagtttaccgtgctggacgcgttacagttaggttataaggtaaacgtgattaccgatggttgtcgtggcgtgaatatccagccccaggacagtgcgcacgcgtttatggagatgtcagcagctggggcaacgctatatacgctggcagactgggaagagacacaggggtaattttacgctggcctacaattctgtactggcattgtaggccaaataaaacacgtcagtggcacatctggcaattgatgccatcaacgaaagatttaattcacctcagaaatctcttccaacgacaccttccgcgtttcgatgccaaaaatggagagaaccagcgcacagagcaataacataacaccaagtaccataaacaccgtgatcgacccataatgtgttaataatgccgcaacgccatagggcgtgaagactgcgacgatccgtccgacggcattaacgaaacccgaaccgcgcaggcgtaaatgcgttggccaaagctccgggatataaaccgccgacgcgaagcaaacatacatgtataaaaagaagatcatcaccagtccatagattaaaatcgcccactctgtagtctgaattgaatagatatagcctaacacggcaataataataagtaaggtggagccaaataaccgacgaggaaaatgatcaataattaatgccgcaataaatattcctaccggagcgccaatcataataacagcggtcattaatattgatttatcgacatcaatgccggagttaacaaatatggtcggtatccatacggtgatggtataaagcgaaatgttcattgcaattaaaacagtaatcgcgactaatgtacgtcgtaacatttcacctttaaacaggagccagaaagtacccttgattactttaaccttgctgttgctctgatacgaagtaagcgggggtaaacgaatactcttctctctttcaatttgctgctctacttcacgaagttggcattctgcacctgcgatttgccctttccctgccagccatcgtggcgactcgataaagtatttacctgagagaaaccaggctaacagtatgccaataccacccagcagaaacattattcgccaactaaaaaaagcgataaccaccacgcctatcgccgcagacagcatgggcgaccagttaccaacaaatgagagccgcgcggaccattttccacgcaccgtcgcggggataaactccgtaaatgaggcatagccaaccataatcagcgcccccattcctgttcccatcaggaagcgaaagaagatgagccagtacatatcagggacaaaagcggcccctgttgcagcaataccgacgatgagaagatttatgcgaaacgccctgcgccgcccaaagtagtcaccaataaacccaccagtaagtgagccgatgaaataaccaaacattaatgccgaggtaaaggcggcattgaggaaattatttgaccatccattgcttaccagctttgctaagacgacattaccggagtaactcaaaaaccctgttaataacagactaaagcttataataccaaatatacgataatgaaaccgggccaaaggcaagcggtccagtcttgcgccaatttgatcatattgttccattaggtgcctcggatttgctaaaaaggtagcaattgcggcaaattcacttgccgcatctttatcatcattttatttcaaggcgcaggaacaaataatattgacaacgtgtgcttaaattaccacaccagctggatattattgtctttgcaaaatgctatccactctgcacccggtgatttatcagttattatgtaattaatatgactaaaatcagctaactggacaaaagctttgcgatcaaacttagagtgatcaaccaataacgcaacttctgtcgcctgacggatcattgtctttttgatttcagcttccgcttcattagagtccagcgcgccgctgttaatatcaagacctttacaactcattaccatgatatcgacatgatagcgcctgatgatctctttagtaattcttccttgcagtgaaagtgtatttttgtttagttccccacccgttgaaacgactttaatttctgactgagccagaacatgaatcgcttccgccgagttggttagcaacgtcaggccactacggtcctgtaacaatttgagcaattccattacggtactactggaatcggctgccatggtggttttattgtcgataaagggtagtgccttgcgtgcaataagctgcttctcttcataaaacgatgaagcgcgcttataaaaatggatattctccgtcaacatcgctgtatttaaaacagcaccaccataggttctggtcaaaaagccttcatcttccagcttctcaagatcgcggcgaatggtttcttcggttacctgaaaaatcccactcaaatttgagactgtcacctttttatcgttggcaaccatttgcttaattgcctgaatcctgtcttttgccgccacgattacacccctgtatctttttacatcacattagcgcgattatcgcataaccgatgtttactttcaaaataacctgtttgaatcacagattttcatcacagttttcacagaaacagaggtgaatcgtgttgagtatttaacgctccagggcctctgccatttccctcatcaatgttgcgtctgcatccgataagttgatattcagtgccgcgacattttcgcgtacctgttccggtgcagtagccccactaagaatggagattaaatcactctgttttaatatccacgccagtgccagagtgggaattgtgcactgataacgagcacaaagtggctgccactgttcaagcatatcaatcactttcagcatgttttcacgctggaaccagactttatttgcccgagcgccgcccggaacgtaatcacgagtgatggtgccggtcaacaatccctgctctagcggggaataaacctgaaccacaatgccattatcacgacatagtggcagcagttcgttttccattgcccggtcgaggatactgtatttcgcctgaataatatccagttcaccatattgcagatactcgcggatatggtcagcatcgacgttagcagcgcctatagcgcgaattttcccttcagactttaactcattaagcactgcgacagtttcagcgatcggcgtaaaaaatggcggcaccgactgccagtgcgtcatgtagatatcgatgtaatcaatacccagacgttgcaagctcgctgctacctcttcgcggatagattccggggaaaggtttttatacaactgccgatcgccaactttgttgaataaacttccttttcgttcccagacaatgccgcatttggtttctactacaacctgttcacggggcagtttttttaacgcctgaccgacgataacttcactattgccaaagttatatcctggcgcagtatcaatcagattaatgccacaacgatgggcttcaagaatcgtatcaatacatatttgccgatcgagatcgccattccatgcaggaccgccgccaatggcccatgtccccaaccccattcgcgaaagcgtaatatccgttgtgcctaaaggtatctttttcatttgccttcattatccttcgtattcttccagcaattgttcgaccagctttctgttttttacgccggtggtggcaccgacgcttagaaccgagatagccgccgttgcattggcaaagcgtgcgcattcacgcagatttttgccttctaacagtgccgcaataaaacctgaagcaaagttatcgcccgcgccaatggtgtcgatggcggttattcctgcgaccgccggcaccttcatcgtcatgtcaccacgcttgataaagcagccgtctttacccgttttaatcaccaccgtttttacgccgcacgcaagaaagcagtcagcaatttcatccagtgtctctttcccggtgagtaattttgcctcggcaaaattaggaaacagataatcgacataactcaatgcttcgcaaatatcatccagcgtttcattcaaccgcggtttgatcatatcggcacagataatcatctgccgggctttagcttgcgtaaaaatttctgttagcgctttaccatccaatagtggactgttgaaaatactggccagtgataataatttcgcctgagaaaaccgcgcaaaatcaacatcgtcaatattcaatttccacagactgccattacggtttgtgacaaacgtccgctcgccatcctccgtcaccagtccaacgttaatagaggtatctatgctgacgtcctgcttcaggctttgaatatcaatattctctttgcggcaatggtcgagaataaattgccctgcggcatctttaccaatacgactcattaatgctgtgcgatggcccagacgagaaataattgttgcttcatttattgcatcacccccggtggtcattgcgattctttcaagaggataagaatccacatcaaagatatttttactgaccggttgcaatggaatatcaacaatagcggcacctatacaaataacgtcgagattatccatatcattattccgctttgccatcagaaccgaacagtttaaatttttccaatgcccgttcttttacagctttacgtacttcacgttctaaatgcaggaaaggctgatcctggttttctttcactgcaaccattgcggcctgacagagctccgtatgaatgttgattttcgcgatacccaacgaaattgcagttttaatgtcggcatcactgatccccgatgcaccgtgcaaaaccagcggaacagaaacggcatcgcgtacgcgtttgacgacctcaaagttcaattgtggctctgacgtataaaccccatgctggttgccgatggcgacagccaatgaatcacagcccgtacgttcaacaaattcagccgcctggtcaggatcggtatagtgatagcccgccagcgcttcctcataaacggtttcattaccgacatgccctaattccgcctctaccggaatacccagcggatggaagaaatcgacagcctctttggttaaacgaatattttcttcgaaatcaaacgcggaagcatcacgcattaatgaattcataccatgagtccaggcgttatgaataatctccatactccgaccatgatcccaatgagttattaccggcaccgttgctttttgtgccattgataccatcatgtgagagaaatcttcaaatgaggtgttaccgacaaaacctgtaccaaaagaaataataaccggggatttcgcttcttcggctgcgtcgataacgcccatcaacatttctgcattccatacgttaaaatgggcaattgcataatgtttatttgtggcatcgttttcccaatatctgatatctgcgagcatgttctgttctcccgtattaattaatcgctaattttaataacgcctttaataatgtcgcgtttgttgttaactgactcttcaaatgcctgttgtacatcccgataatcgtaaatatgcgtcaccatcgatttcacatcgaatcgccctgaagaaatagcttcaatcgtgaccggataacgattggcatagcggaataccgtctggatagtgacttcgcgattgattttgaggaaattgattgccgaatcgccgggtacagtaccaacaatcataattttaccgccgcgcattaccagataaggtgcctgtttaacggtgaccgcagaacccgctgtttcgaaaacaatatctgcgcccatgtcttcggtaaattgctgacagcgtgcaatagtgtcttcttttgcgccgttaataaccactgtcgcaccaagctgttccgccattgccagacgtttttccagcacatcaacgacggcaatttccgttgctcccaggcatttgcacgcttgcaacgtcatcaaaccaatacaacctgctcccagaataattatcttcttacccggtttaacatctgccagcatcgcggcatgcatcccgactgcggcaggctccaccagcgccccttccatcgtgtccatattgtcgggcagtttgtaagtaaagctctccggatgacacagatagtgcgttaatgcgccgcggtagttgggttgtgtcgccataaaatcaacgtccgggcagatgttatatttgccttccagacagtaacgacagtgaccgcaaggaacgccaggttcgatatttacccgatcccccggtttaaatttgcgcacgcggcttcccacagccacaaccgtcccggcgcattcatgacccaggccaatttcttgatttgggtctttaggcggaataaacgggcctgattcaaaaccatgtacatctgaaccacaaataccgacatattctactttaatcaaaacttcatcttctttaggcactggtatttctgctgaaataattttcattgtgcccggcacctgcaatattgcttttgaatttttcattttgaatccacccgtattatttattggctactgcatcaatacttaaactttcaacggagacacctttggtttcgattccaatggtggcgatagcaattgcgacaataattgaaaccgcccccagaagaataaagactcccgtaacgccataactactgagcagcactgcaacggcataaggtgcggcaataccactgattcgccctaccgcattcgccagaccggagccacggagtttggcctctgtcggccagatttcagggacatacactgccgaggcatagcaaacgtacatatagacgaaagtaatcaggaagaaaccaatcaacgttatgagcaacatactggtttgcagtgaatagatatatccgagcaccgcaatcaggattaatagccccacacccattgttttacgcggaattttatccatcaccagcatggcaataaaaataccaaatggcgcgccaaacatactcatggtatttaaaacaatcgagtcttttaaattaatcccctgggtcatgaatattgttggcaaccagttaattagtgtgtactgcacaacgttcatggcaatcagcacacaagagcctaatatcacgcgtttcagtaatactcctgtcagtaaggctgaatacggcaccgcttgtggcgctttaccgtcatcagcaataaccacaggcggcaaaggtttacccgtctggcgtatgacgccttcttctatactccgcatgactttctcggcttcctgataccgtccgcgcgattccagccagcgcggggattcaggaaagtagcgccaggccagcgccgtagcgataagcgacaatattgcagggataagcagttgtacccgccagttccactctgcactaatcagcggcgtgagtcccatcgctatcaatgaacagagcggatatgaccagttgccaataaaggaaacccgacttgaccacgttccacgatttctaccgggcatatattcggtgaaaccagcaaacagcgtaaccagtaaagctcccagcccaactcccatcacaaaacggcaggcaataaggaaatccatattcggtgagaaagcaccgacaaccatcgaggcaatatgaatggcctcatagaggatgaacgcatttctgcgaccggttttgtcgccaatgatgccgcccaccagcgcaccgagaaacattccggcggtcgtgattgctgagaatgtggctgtggtggaattatctgtccagcccaacgctttcagctgcgcgaggatcaagccaccaacggcattactccagcagacaagcaagccaaacgcgacgatggcaaacattgatgaatgccagcggcaatccggtaagcgatccagccgtgcaccacaatgcggttttgttatctgttccatgcgataacgttccttcaggagagtggttattcatcaaagtcgtaagtcatgatcactttgattgcggttttatcgaccatcgcatcaaacccttcgcgccattgcgacaggccgatacgatgcgtgatcatcggtttgactttgatagcgccgctggctaatagcctgatagcgttacgccatgaggtggagtcataggccatatgcccaatgatgcttttgttccaggcggtaatgtcattaatcgagaaatcaagaggtttgaagcccattccaacgcgtaccacttccccgttcgggcggagcatttcgatggcttgtttcagtgcgatattggcaccggagcattcaatcaccagtcccagattgtctttgccacaaatttgctggcagcgcgccaccacatcttcggtagaaccatttactactgccgtcgcacccagttcttttgcaaccgggaagcggaccgccacatcttcttgcagaccaacgacgacgatatttaccgcccccataattcgcgccatttgtacggagaacagcccgagtgggccagtgccgatgacgaccacatcctgaccaggaaggaatttcgattgctgcgcgatggatttgtaggcattacagatagggtcaagtacggctgcgtcctcataatcaacaccatcagggatttcccacaacgcatgacgatgaattttgagaatttcaccaggaaccagacaatatttggaaaaaccaccgccccaggtattattatccagaccaaggtttactttttctgtacaacacagaaaatcaccttgttcacaggccggacaaacaccgcaaacgtgaccgctgttatccgatacgacgcgttgccccactttccagtctttgactttttcaccaacctgcgcaatacaacctgcgaactcatggccgcggatagagttaaactcatcagaaccgctatcgacattgtagtgcttcatgtctgcgccgcagattgccgcggctttaatttcaatcactacatcttccgggccacacatgggttgtgggacatcaatcatcttgtagccgccaaaggccttgccaaaccgagccagtgctttcattgcgtcatcctctgtgtttagttttgcttagatggccatcatacttacccacatgatttttgaggtcaacattaaatctgtaaaacacagataatgatctgcgttttacaactcagatcacaattacgcagaaaatggctgggtctgttacaggttgatggaaggcggggcgcaaaaagagcaaattcgagagggattaccggccaaataggtctgagacttaagttcaggagaagtcattcaggtgtgaacgggacggcaagagatcggactgggacttagccaggtcatggcgagataattgagatgagtcgtggggtcattgttggctatccccttcatagccgaggcaaaaaggggatgaaccacttacttaaacatggcaataggctttgctgagataccaaaatcttcttttaactgctgtttgctcttcatgaccatctgaccatttgtgtcaattgtcatatgctgtgcttcgatattatggcgggcttgccacagcatcaccagttgcaggcagttctctttttgttcctcggtcaacgcaacgccatcaggccatttccccagttcaacggcggtcgacaaacgctggtatacctcaggcatcatgctgttgataatgtcatcaagattcataatttttccgctcctgtggaataagttgctgaatcgttttttcaaccgttgatttcttcgccgttttcgccatcggtaaagcgtaaagaggcagagttaacacaataacgttcgcccgttggctgcggcccgtcggggaagacatgccccagatgggcatcacagttaccgcaacgaatttctatgcgctgcattccatgtgacaagtctttgatataacgaatggattcttcacttaccggttcgtagaaactgggccagccacagccggaatcatacttggtttgggaatgaaacagcggggcatcgcagatcaaacagtgatatacgccgtcacgcttgttatgcagtaaacgacccgtaaatggcggctctgtcccatgattctgcgtcacgtaaaactgcatctcggacaaattttttttcagttcttctgccgaaggtttattagccatttgctcacatctcactttaatcgtgctcacattacgtgactgattctaacaaaacattaacaccaactggcaaaattttgtcctaaacttgatctcgacgaaatggctgcacctaaatcgtgatgaaaatcacatttttatcgtaattgccctttaaaattcggggcgccgaccccatgtggtctcaagcccaaaggaagagtgaggcgagtcagtcgcgtaatgcttaggcacaggattgatttgtcgcaatgattgacacgattccgcttgacgctgcgtaaggtttttgtaattttacaggcaaccttttattcactaacaaatagctggtggaatatatgactatcaaagtaggtatcaacggttttggccgtatcggtcgcattgttttccgtgctgctcagaaacgttctgacatcgagatcgttgcaatcaacgacctgttagacgctgattacatggcatacatgctgaaatatgactccactcacggccgtttcgacggtaccgttgaagtgaaagacggtcatctgatcgttaacggtaaaaaaatccgtgttaccgctgaacgtgatccggctaacctgaaatgggacgaagttggtgttgacgttgtcgctgaagcaactggtctgttcctgactgacgaaactgctcgtaaacacatcaccgctggtgcgaagaaagtggttatgactggtccgtctaaagacaacactccgatgttcgttaaaggcgctaacttcgacaaatatgctggccaggacatcgtttccaacgcttcctgcaccaccaactgcctggctccgctggctaaagttatcaacgataacttcggcatcatcgaaggtctgatgaccaccgttcacgctactaccgctactcagaaaaccgttgatggcccgtctcacaaagactggcgcggcggccgcggcgcttcccagaacatcatcccgtcctctaccggtgctgctaaagctgtaggtaaagtactgccagaactgaatggcaaactgactggtatggcgttccgcgttccgaccccgaacgtatctgtagttgacctgaccgttcgtctggaaaaagctgcaacttacgagcagatcaaagctgccgttaaagctgctgctgaaggcgaaatgaaaggcgttctgggctacaccgaagatgacgtagtatctaccgatttcaacggcgaagtttgcacttccgtgttcgatgctaaagctggtatcgctctgaacgacaacttcgtgaaactggtatcctggtacgacaacgaaaccggttactccaacaaagttctggacctgatcgctcacatctccaaataagttgagatgacactgtgatctaaaaagagcgacttcggtcgctcttttttttacctgataaaatgaagttaaaggactgcgtcatgattaagaaaatttttgcccttccggtcatcgaacaaatctcccctgtcctctcccgtcgtaaactggatgaactggacctcattgtggtcgatcatccccaggtaaaagcctcttttgcattacagggcgcacaccttctctcgtggaaacctgcgggtgaagaagaagttctgtggttgagcaacaacacaccgttcaaaaatggcgtcgctattcgcggtggcgtaccggtttgctggccgtggtttggtccggcggcacaacaaggtctgcctgcgcacggttttgcccgcaacctgccgtggacgctgaaatcacatcatgaagatgctgatggcgtagcgctgacttttgaattgacgcaaagcgaagagacgaaaaaattctggccgcacgactttacgctgttagcgcatttccgcgtgggtaaaacttgtgaaatcgatcttgaatcacatggcgaatttgaaaccacctctgccctgcatacctactttaacgtgggtgatatcgctaaggtaagcgtcagtgggctgggcgatcgcttcattgataaagtgaatgacgcgaaagaaaatgtactgaccgatggtattcagaccttccctgaccgtaccgatcgcgtgtatctgaatccacaagattgcagcgtgattaatgatgaagcgctgaatcgtattatcgccgtaggccaccagcatcatctgaacgttgtcggctggaacccgggaccggcgctttcaattagcatgggcgatatgccggatgatggctacaaaacatttgtttgtgtagaaacggcttacgcttcagaaacgcaaaaagtgaccaaagagaaacctgcacatctggcgcaatccattcgcgttgcgaaacgttaatttacgttaatgttgtgtgccgggtgcaatgcatccggcacacaacatcacaccatatccagcgcagtttttccttttggtgccggatatgccttatccagcatagctaattccgctgaagaaagttcgacctcaagcacagccgcattttgttggacatgggcaatcgtggccgcttttggaatcgccatcacaccctgatgactgatcacccacgccaacaatacttgtgccgcgctgatattgtgagcatgtgcaatttcgttgactaccgcgttttttaacagtccattgcgcaaccgcccggcctgggctaacggactgtaagccatcaccggcatctgctgttgctggcaccaggggagtagatcgtactcaattcctcgtgaaccgagatggtaaagcacctgattagtggcacactgatttccccccggcagctgccagagttcctgcatatcagcataatcaaggttagaaacgccccagcggcggatttttccctgggcgatcaatttttccatcgctgcgacagtctcttcaaaagcgaaactgccagaccagtgtaataagtaaagatcgagataatcagtattgagacggcgtaaactggcttcgcatgcatttatcgctttttgcccgccagcattccacggatagactttagagacgagaaagaccttctctcgcagaccggttaatgcttccccaaccaccttttcggcaccgccatcggcatacatttcggcggtatcaatgagggttaaaccgagttcaatgcccgcgcgtagtgcagcaacttctgttttgcgctgactggcatcttcgcccatataccatgttccctgccctacggctggcagtgagacatcgccactaaattgaatcattttttgttgcattgtttcctcccaggtattgcaccaccgtaatgcaaaacagggcgtgacgccctgtttttatgcacaaaatgccctggaaagatgcattatcagaatttgtaggtgatcccggtagaaatcaggccagtccaggatttatccaccatcgggctgtcagtaacttcatcagacagacgggtgtagcgtgcggtaccgtaaacactccagtcgccgaggaagttgtagctggcgctcagctccaggtaagggctccagctgtcgttcgggttatagccacgcagaccgctgcgagcggactctttgcgcgatacgccataatagtattcgttctggttttcgctgttccactgcacaccaatacccggagtcacggtcaggccaccgttggtgtaacgatacaaccaggccatatcccagacgatgccgttgctgttatccagggtatcgccagccagggtggtacgcaggtaaccgtactgggtaaagtgagcataagacagaccagccatcatggtgctcttacggtcatccaggtgacgcatttggtgatcgccactgtctttcgctttgaagtaaagcggcgaccagtaagcggtaattgaaagtttatccgttgcgtcattccacaggtagtaaccaccacctaagccacggaaccagaagttatcgccttcatagttgattaccggtactgggtaaacatcggtatcgtaatctttatatgggtgttcaacgacacctacgcctgcgcccagggaaaatttaccttcagcgtgcgctacgcctgcagacgttgcgataagcactccaagtgccagaagtttgagtttggtcacaattaatcattccttaaacaaatgtttagcgggcgacaaagtttacccgtcaatacatcgaaacccaacctttttacgttttcattttttaaagtaactgtttaattttcctgacgcggatgacaccgcgcttacagccaaatgaatttagcgttactggcgagcctggtctttacattaattatgcaaaatttatggatgagttgttgatatgccattgaaattaagaaagccgtgcaggcaagttttccatttgccatctacgcttaattttgaaggtgtatcaccgggcacgttgttctcatcgtcgataaaatggcatgagagttgctgtgttttagcaagagacgtcgttcagtttacctcttccgggagcctctactattcatatgaacggctcttaacctgtgctaaaaaacgaaaggacggcataccatgaatatattcgatcactatcgccagcgatatgaagctgccaaggacgaagagttcacactgcaggagtttcttaccacttgtcggcaagatcgcagtgcttatgccaacgcggctgagcggctattgatggctatcggtgagcctgtcatggtcgatacagcccaggaacccagactttctcgactcttttctaaccgggtcattgcacgttatccggcgtttgaagagttttacggcatggaagacgcgattgaacagattgtctcttatctgaaacacgcggctcaggggctggaagagaagaaacaaatcctgtatctgctggggcctgtgggtgggggtaaatcatcgcttgctgagcgactgaaatcattaatgcagctcgtaccgatttatgtattgagcgcgaacggtgagcgtagcccggtcaacgatcatccgttctgtcttttcaatccgcaggaagatgcgcagattctggaaaaagagtatggcattcctcgccgttatctcggcaccatcatgtcgccgtgggcggcaaaacgcctgcatgaatttggtggcgatatcactaagttccgggtagtgaaggtctggccgtcaattctgcaacaaattgctatcgccaaaacggaacccggcgatgagaacaaccaggacatctccgcgctggttgggaaagtcgatattcgtaaactcgaacactacgcgcagaatgacccggacgcctacggctattccggtgcgctgtgccgcgccaatcaggggatcatggaattcgttgagatgtttaaagcaccgattaaagtgctgcatcccttgttaaccgccactcaggaaggtaactacaacgggacggaaggtatctccgccctgccgttcaacgggattattctcgcacactcgaacgagtccgaatgggtcactttccgtaataacaaaaacaacgaagccttcctcgatcgtgtttacatcgtgaaggtgccgtattgcttgcgcatttccgaagagatcaaaatctacgagaaattgcttaatcacagtgaattgactcacgccccatgcgcccctggcacgctcgaaacactgtcacgtttttccattctttcgcgcctgaaagagccagaaaactccagcatttattcaaagatgcgggtttatgatggcgaaagtctgaaagacaccgatcccaaagccaagtcgtatcaggaatatcgtgactacgccggtgtcgatgaagggatgaacggtctgtcgacgcgttttgcgtttaagatcctctcccgcgtgttcaacttcgatcatgtagaagtggcagcaaacccggtccatctgttctacgtcctggaacagcagattgagcgcgagcagttcccacaagagcaggcagaacgctatctggagttcctgaaaggttatctgatcccgaaatatgccgagtttatcggcaaagagatccagacggcctaccttgaatcctattccgaatatgggcaaaacattttcgaccgttatgttacctacgcggatttctggattcaggatcaggagtatcgcgatccggataccgggcagctgtttgaccgcgagtctcttaacgccgagctggagaaaatcgagaaaccggcggggatcagtaatccaaaagatttccgcaacgagattgttaacttcgtactgcgcgccagagcgaataacagcggacgcaatccgaactggaccagctatgaaaaactgcgcacggtcatcgagaagaaaatgttctccaataccgaggagctgttgccggttatctcgtttaacgccaaaacgtcaaccgacgagcagaagaaacacgacgactttgtcgaccgtatgatggaaaaaggctacacccgtaaacaggtgcgtttactgtgcgaatggtatttgcgcgtacgtaaatcgtcttaacaaccctggcccggtacacatgttaccgggcctacaacgacagcgaaccgtgggcctgagaagcggcaacacaggcgtagcatacagttggcaaatgtagtacggggggcatatgacctggtttattgaccggcgtctgaacggcaaaaacaaaagcatggtgaatcgccagcgttttttacgccgttataaagcgcaaattaaacagtcgatctccgaggccattaataagcgttcggtgactgacgtcgacagcggcgaatccgtatccattcccacggaagatattagcgaaccgatgtttcatcaggggcgtggcggtctgcgccaccgcgtgcatccgggcaatgaccatttcgtccagaacgaccgaattgaacgtccccagggtggcggcggaggttccggcagtggtcagggccaggccagccaggatggtgaaggtcaggatgaatttgtctttcagatttcgaaagatgagtatcttgatctgctctttgaagatttggccttaccgaatctgaaacaaaaccaacaacgccagctgaccgaatataaaacgcatcgggcgggttataccgctaacggcgttccggccaatatcagcgttgtgcgttcattgcagaactcactggcgcgacgcacagccatgacggcaggcaagcggcgggaacttcatgcactggaagagaatttggccatcatcagcaacagtgaacctgcgcaactgctggaagaggaacgtctgcgcaaagaaattgcagaattacgtgccaaaattgaacgcgtcccttttattgacaccttcgatttacgttacaagaactacgagaagcggcccgatccctccagccaggcagtgatgttttgcctgatggacgtttccggttcaatggatcaatccactaaagatatggctaagcgtttttatattctgctgtatctgttcctcagcagaacgtataagaacgtggaagtcgtatacatccgccatcatacccaggcgaaagaagtcgatgaacatgagtttttctactcgcaggaaacaggcggcaccattgtttccagcgccctgaaactgatggatgaggtagtgaaagagcgttataacccggcacagtggaatatttacgctgcacaagcatcggacggcgataactgggccgatgactctccgctttgccatgaaatcctggcgaaaaaattattacctgttgttcgttattacagctatatcgaaattacccgtcgtgcacatcagacattgtggcgagaatatgagcatctgcaatctactttcgacaactttgcgatgcagcacatccgcgaccaggatgatatttatccggtgttccgtgaactgtttcataaacaaaatgcaacagctaaaggctaaaactatcagccaggtcattatcgcctggctgatttttagcttactgtaaattatctcatttattacatacattagcttacaatcgctttaaatatgacagcataacctttacataatttagttccagaaaacaatcattcggaaaaatgattcagtcaacacgtatttccatggggttattctttaaatattttttatcgttaacgaaaattgatcctggtcaaaactatatatctctgccatcaataaaatccagcactcacattgctctcctttttatggtttctatgggtacacaaaaattaaaagctcaaagcttttttattttcagtttattgctgacgttaattttattttgcattactaccttatataacgaaaacacaaatgtaaaactcatcccacagatgaattacctgatggttgttgtggctttgtttttccttaacgccgtcatttttcttttcatgttaatgaaatatttcactaacaaacaaattttaccaacactcattttaagccttgcatttttaagtggccttatctatttagttgaaaccattgtaattatccataaaccaattaacggcagtacactgatccagacaaagtcgaatgatgtttctattttctatattttccgccaactcagttttatttgtttaacctcgctggcgctcttttgttatggaaaagacaacatccttgacaacaataagaaaaaaacgggaatcctgttgctggcgctgatcccttttttagtttttccccttctggcacacaatctgagcagttataacgctgactattctttgtatgtcgtcgattactgtccggacaaccatactgcgacctggggaatcaactatacaaaaatattggtttgtctgtgggcatttttactgttctttattatcatgcgcacacgattagccagcgaactatggccgttaatagcattattatgtctggcatcgctatgctgcaacttacttctactgactctggatgagtataattatactatctggtatatcagtcgcgggattgaagtttccagtaaactgtttgttgtgtcttttctgatttataacatttttcaggagctgcaactctccagcaaactggcagttcatgatgtgctgaccaatatttataatcggcgctactttttcaacagcgtagagtcattattgtcgcgacctgttgttaaggacttctgtgtcatgctggttgatattaatcagttcaaacgcatcaatgcccaatggggacatcgtgtgggtgataaagtgctggtttcaattgtcgatattatccagcaaagcatccgccccgatgatattttagcgcgactggagggtgaggtgtttggcttgctatttaccgaactcaatagtgcccaggcaaaaatcattgcggaacgtatgcgtaaaaatgtcgaactcctgaccggctttagtaacagatatgatgttcctgaacaaatgaccatcagtattggcacggttttttcaacgggtgacacgcgtaatatctcgcttgtcatgacggaagcagataaagccttacgcgaagcgaaaagcgaggggggcaacaaagtgattattcatcatatttaagtgcaaaaatattcagagccatgctttttgcgtggcttttgcatacaatttattactattacccctaaatttcccctccccagcggcgcagagatgagtataattagcgcccctgtgccaggccgcaatcgaactttatctggttttctcgtttcactaaccgaaggagtgccatttatcatgaaattgcaccatagaatgctccggcattttatcgccgcaagtgtcattgtgctgacatcttccttccttatttttgaacttgtcgccagcgacagagcaatgagtgcctatctgcgctatatcgtgcagaaagcagactcctcctttctttatgataagtatcagaatcagagtattgccgcgcatgtgatgcgcgctctcgctgctgagcagtcggaagtgtcgccagaacagcggcgcgccatctgcgaggcttttgagtctgccaataacacccatggcttaaacctgactgcccataaatacccgggcttacgcggcacactacaaaccgcatccactgactgcgacacaattgtggaagctgcagcactattacccgcttttgatcaggcagtggaaggcaaccgccaccaggatgattacggttcaggtcttgggatggccgaagagaaatttcactattatctcgatctcaatgaccgctatgtctatttttatgagccggttaatgttgaatactttgcgatgaataactggtccttcctgcagtcaggaagtattggcatcgatcgcaaagatattgaaaaggtatttaccgggcgtaccgtattgtcgagcatttaccaggatcagcgtactaaacagaacgtgatgagtttgctgacgccggtatatgtcgcagggcagctaaaagggattgtgctgctggatattaacaaaaacaatctgcggaatatcttttatactcatgaccgccctctcctctggcgttttctcaatgtcacgctaaccgataccgattcggggcgcgacattatcatcaaccagagcgaagataatctgttccagtatgtcagttacgtccatgacttaccgggcggcattcgtgtctcgttatccattgatattctttactttatcacgtcttcgtggaaaagcgttctgttctggattttgacggcgttaattttgctgaatatggtgcggatgcacttccgtttataccaaaatgtgtcgcgagaaaatattagtgatgcgatgactggactgtataatcgcaaaattttaacccctgaactggagcagcggttgcagaaactggtgcaatccggttcttcggtgatgtttattgctattgacatggacaagttaaagcaaataaatgacaccctcggtcatcaggagggggatttagcgattacgttattagctcaggcgattaaacagtcgattcgtaaaagtgattatgccatccgactcggtggcgatgaattctgcatcattcttgtcgattcgacgccgcaaattgcagcacaactgcctgaacgtatcgaaaaacgtctgcaacatatcgcgccgcagaaagagatcggcttctcttccggtatttacgcgatgaaagaaaacgatacgttacatgatgcgtataaagcttccgatgagcgtttatatgtcaataagcagaacaaaaacagccgttcatgataaccttctgtggttgtttgcttgtaatctcaggagcgtgaaatgactgaaatggctaaaggaagcgtgacgcatcagcggttaatcgctttattatcacaagaaggtgctgacttccgcgtcgttacccatgaagcggtaggtaaatgtgaagcggtgtcagaaattcgtggcaccgctctaggccagggtgctaaggcactggtatgtaaagtcaaaggcaatggcgtaaatcaacatgttctggcgatcctcgcagccgatcaacaggccgatctgagccaactcgccagccatataggcggattacgcgcttcgttggccagcccggcggaagtcgatgaactcacaggctgtgtcttcggcgcgatcccccctttcagcttccatccaaaactcaaactggttgccgaccctctactcttcgaacgatttgatgaaatcgccttcaatgcaggcatgctggataaatccgttattttgaaaaccgcggattatttgcgcattgcgcaaccagaactggtcaatttccgccgcactgcgtaactagccggtccgttcgataagaagaacggacaaaaccagtacaacagcaatggcaaaaaacgatgacgtgataatcagtgtctcgacaaacatttgatcgttcatagcatgcccccgggagatagctgttttcacgttattgttagcgtgcacaaatggcagtttgatgacagttcgcctgattttttatgcaaaaaacgtaaagattttctacttccttcctgcagcaagcgtaaagtaagcaggcttattattttttggcaaggaaaccacgatgtttgatgtcactttgctgatcctgctcgggttagctgcgctgggctttatcagtcataacaccactgtcgccgtttcaattctggtgttaatcattgtccgcgtcacaccgttaagcaccttttttccgtggattgaaaaacaggggctaagtatcgggataatcattctgacgattggcgttatggcccccatcgccagcgggacgctaccgccctcaaccttgattcactcgtttctgaactggaaatcactggtggcgattgcagtaggcgtgattgtctcctggctgggtgggcgcggcgtgacgttaatgggcagccagccgcaactggtcgccgggctgctggtaggcactgttttaggcgtagcgctgtttcgcggcgtaccggttgggccgcttattgccgcgggtctggtttcgctgattgtggggaaacagtagttaatctcgcaatatatcggcctggcgtttgccccaggcctttcttaaacatagtaataaaggccgttgttgaatcataccccagcgtatgagcaactttctgtacagtatcgcctttcactaatccctgaagcgccataatcagctgtaactgctgacgccactggcgaaaactcaaccccgtctcttttactatcagtcgggcaagattgcgttcactcatcgcaaaaaagccagcccattgccccaatgccccccactcgacaggccctttcgccatcatctccaccatcgtgcggattttaggatgagaagaaacgggcaggtgcagctgttgttgtggctgctgagggagttcatcaaacaggacctgaattaatctgcgggtcattggctcagcacgctgagtcgtcgtcctgtttgccagggttaaaattaattcccggcataagggcgatattttcaatgtgcaacatgttgtcggcattgtcactgcgctgggttcgataaacagaaaacagagttcagcattagctgttacttgattgctatgttccaccccgcccggtatccaaaccgcatattgtggcggcaccatccacaaagcattttccaccgtacaggtaattgcaccatgtagcgccagtatcagctgtcctttgcggtgctgatgtacaggactggttaactcatccgttccggcgtgaatacaaaatgcgaccgcggcttcatggtgtcggtcgggttcatagccattgagattcaacctgtgcatcattttgtccgaacttagcgataatttgtcattttagcttgattcaacataacaataaaaacggtaaggtacagcctcgtttgtaacaatgagaagcatatgacctgttcaacttcattaagcggcaaaaacaggattgtccttatcgctggcattctgatgattgccacaacattacgcgtcacctttaccggcgcagcaccgttactggatacgattcgttccgcttactcgctgacgacagcgcaaaccggcttattgaccaccctgccattattggcctttgcgctaatctcacctttggctgccccggtagcgcgacgttttggtatggaacgtagcctgtttgccgcgttacttttgatctgtgctggtatcgcaattcgctctctcccttcgccttacttattatttggcggtacagcggtcattggcggtgggattgcattaggcaatgtcttactgccaggattaattaaacgcgatttccctcattccgtcgccagacttaccggcgcatattccctgacaatgggagctgcagcggcactgggatcggctatggtcgtgccgctggctttgaacggttttggctggcaaggcgcgttgctcatgctgatgtgttttcctctgctggctctttttttatggctgccacagtggcgaagtcaacaacatgcaaatttgagtacctcgcgcgccttacatactcggggtatctggcgttcaccgcttgcctggcaggtcacattgtttcttgggatcaactcactggtctattacgtgattattggctggcttccggcgatcctcatcagtcacggctatagcgaagcacaggcgggttcactgcatggtttgctgcaactagccacagcagcacccggtttgctgatcccacttttcttacatcatgtgaaagatcagcgtggtattgcagcgttcgttgccttgatgtgcgcagtgggcgcggttgggctctgctttatgccagcgcacgcgatcacctggactctgcttttcggttttggttccggcgcaacaatgatactggggttgacgttcattggtctgcgggctagttctgcgcatcaggcggcggcactctcggggatggcacaatccgtcgggtatttgttggcagcctgtgggccgccgctgatgggtaaaatacacgatgctaacggtaactggtctgtaccacttatgggtgttgccatactttcactactgatggcgattttcggactttgcgccgggagagacaaagaaattcgctaatatccggtgctatagtgacgtaacaaatcatgcgtgaaagggagaacaaacacgatgaatattcagtgcaaacgcgtttatgatccggctgaacagagcgatggttatcgcatactggtcgaccgcctctggccgcgcggtatcaaaaaaaccgatttagcccttgatgagtgggataaagaaatcacgccgtcaacggaactgcgcaaagcctttcacggcgaagtcgtcgattatgcaacctttcgcgagcaatatcttgcagaactggcgcaacacgagcaagaaggaaagcggctggcggacatcgccaaaaaacagccgctgaccctgctctactcagcaaaaaacaccacgcagaaccatgcgctggtgctggccgactggctacgtagcttgtgattttagtacagcatccggcggttatttttcaccagccggatggtcacgccgccacaatgcccattcatcaatcgtttcaccgcccggtaatttgcaattgttgctgaccccttgcgctgtctgcactggaatgagcgtcccgcccttctgctggcaatagaccgacgccggatttgccataccaatctgcggcggtttaggtgcttctggctgagaaggggttgaacaaccagccaggaccagcaagcaaggcagaacaaaactgataattttcatttattgatctcacatatttatccaagattagagtatcgcggtatcgttttgttttgcagcactatttttattacattcactcaaaacatattacgtcttgtttcatctttgttgatgatgttttatcatgcctgcaaagattaaataatcagcatttacccgccgtatcctggagttgttccgtgtcagatcagattatcgcccgcgtctcgcaatcccttgccaaagaacagtcactggaaagtctggtccgacagcttctggagatgctggaaatggtcactgatatggaatcaacctacctgaccaaagtggatgtcgaagcgcgcctgcagcatattatgtttgcccgtaacagccagaaaatgtacatcccggagaattttaccgtctcgtgggattactcgttatgcaaacgcgccattgatgaaaactgctttttcagcgatgaagtccccgaccgttggggtgactgtattgcggcacgcaatcttggcatcaccacatttctgagcacgccaattcacttaccggatggatcattctatggcacgctttgcgccgccagcagtgagaagcgccagtggagtgaacgcgcggaacaggttttacagttattcgccggactgattgcacaatatattcaaaaagaggcactggttgaacagctgcgcgaagccaatgctgcgctgattgcgcaatcgtataccgactcgttaaccgggctaccgaatcggcgggcgatttttgaaaatctgacgacactgttttccctcgcccggcatcttaaccataagataatgatcgcgtttatcgatctggataacttcaaattaatcaatgatcgttttggtcataatagtggcgatctgtttctcattcaggttggcgagcgccttaatacgctccagcaaaatggcgaagttattggtcgtctcggcggtgatgagtttttagttgtttcactaaacaacgagaatgcggatatttcgtcgctgcgagaacgcattcagcagcaaatacgtggagaatatcacttaggtgatgttgatttgtattatcccggtgccagtcttggcatagtagaagtcgatcctgaaacaaccgatgcagacagtgccctgcatgctgccgatattgcgatgtatcaggagaaaaaacacaaacagaaaacaccttttgtcgcgcatccagcgctacattcctgaggcgtattcacatccttttgattggtgataacatgcgaatcggtattatttttccggttgtaatcttcattacagcggtcgtatttttagcatggttttttattggcggctatgctgccccgggagcataaagatgaaaaaaacaacgattattatgatgggtgtggcgattattgtcgtactcggcactgagctgggatggtggtaacgtcacctctaaaaaatagcaaaggctgcctgtgtgcagcctttgtgcaatttaagcgttaacttttaatcttcctgtagataaatagcacgacaatcgcaccaataacggcaaccacgaagctgccaaaattgaagccatcgactttaccaaagccaaacagcgtgctgatccatccgccgactacggcaccgactatccccagcaggatagtcataaagaatccacctccatctttacctggcatgatccacttcgccagaataccggcaataagcccaaaaataatccatgacagaatgcccattgtttcctcacttatctgttttgcattagcgggttagtcgctgataaaaagcatagcacaacatcgggagggcaagatttgtgacgagcatcacggaggttttttttgcgatggcgcagaaattgcgccatcaacgatcagtgataattaccaaccacaaacatcatgttcgttttccgtgtcataagaacgtacggtattcaccagatcttttatcacttcagccgccacttctggcaccagcaaagtcatcggcgtctctgtttcataatcgacagaaacgccattgctgttattggtgacggtcacggtatacgttgctttgcccatgattcatttcccgttatgaatgactttccgttgttgcgcaccttccatcaggacttcaggagccacgaagaagtcaatgttgaaataagtatcgtcagtcatggcttcaatgttgtgccacttttctggagggaacaccgcaaactgccccgcttcgataaggatcacctgatcaggctctgcactgtgttcatcagcgtagccgagatatttgaccgccccatgcataacggaaaggcgtgggtaaacccccgggcgcgttcctttatcaagatgacgttcgaatattccggcaggtgcagtttgtttattccagaaaggcgttgagcgcgtatgaatataattctgtgggatttgaagcatccttttccctccttcggtgaatgcgctgaaaacggtttattccagccgtttcagggtacgcctgataatttgcattttaaataccatttattggttactttttagcaccatatcagcgaagaatcagggaggattatagatgggaagcccgcgacaacgcgggctgaaagcatcaggattgcagcgtcgccagtcgggcagcgaaacccacgaacatcaaaccaatcagtgagttgccaactttagccagtttctttttggtacgtatgtactgcgtgacaaaagcaccagatataatcaggaagctcaaatagcagaaactcaccagttccagcgtcgccgccagaataaagaatgaaattcccgtatgtggggcattaacatcgataaactgtacgaaaaacgacacatagaacaaaatggctttcggattagtcaggctcaaaattaacgcgcgtttaaaaatagcaccgtattggggctcatcggatttggcctcgctatttttacccttcagggtcgcgtaaagaattttactccccagatagagcaaataaaacgcaccaagataacgtacaatgttgaataatatcggggtggtcttaattaatgtcgccactccagcccatgccagaaacatcaataccgcatcgccaataaatacaccgcaggccgcaagataaccgcctttcataccgctactgacgctatttttgagtacaaacagggtatttggccctggcaccaacacaataaaaatggccccaaccagataggtccagtaattcagaaccccgtattcagcgaacacattaacctctttaattatctttcgatcatgcgcgattaaaggtgaatatgctaaccaatctgtagcggcttagaaaggagaaaatcaggttttaacctgatatcaacccgataattgaatcattaatcaggcatgctccagtgaaaaattcgggtagtgctcggcaaaatactggcgtaaaaattctaccgttatccgcactttcgctgacgtcgccagccttgaaacataaacggcccagacgttcgctggctggtaatattccggtagcacttgcactaaatgaccactggcaatgttttcgctaacatcccaccaggaacgcagagcaatcccctgcccatcgagacaccactgatggacaatttctccatgattagacgacagtgggccggtgactttaatcgcatgggggccttctttattgcgtaattgccagacaccaaaaggatgatcgcgctctttaatgaccaggcacggcaatgcagaaagatcggttaaatgtttcggcgcgccatgttgcgcaataaattccggcgacgcgcagagaatacggtaattggtcgccagtttgcgggcgattaaattaggggcgatgtcatcgccaatgcgaatatcgagatcgacaccttcattgaccaaatcgaccagtcggtcttccacatcaaaacgtaattccagttgcggatacgccttcgccagcgctaataacgccggagccaccacctgtcgtccaaaaccaaagctgctgataatacgcagcatcccctgcggcacctgacgcacgtcagaaagttcgtccatcatctgaccgacatcctgcaaaatccgctgcgcccattcataaatccgctctccttcttcggtaatggtgacgcggcgggtggtgcggtgtaacaacaccacgtttagcgtttgctccagcaaggcgatgcgcttgctgacgaacgccggtgaaacgcccagttcttccgccacggcggcaaaaccagcccggcgagccaccagcataaagacgcgcaaatcattcagcagcggtaaattattcatgattcgtgttttatgtttcaccagttacggggattaattccttttcagtcaattataggatggtgatgttgtcaattttgatggtcaggaagtgagaacccaatgatgaaaacgatgcgtattgctgcgatcccgggagacgggattggcaaagaagtccttcctgaagggattcgcgtgttacaggctgccgctgagcgctggggcttcgccttgagttttgagcaaatggagtgggcgagctgcgagtattacagccatcacggtaaaatgatgccggacgactggcatgagcaacttagccgtttcgacgccatctattttggtgccgtcggctggccggataccgttccggaccatatttcgttgtggggttcgctgctgaaatttcgtcgtgaattcgaccagtacgtcaacctgcgcccggttcgtctctttcctggcgttccctgcccgctggcgggaaaacagcctggcgacatcgatttttacgtggtcagggaaaacaccgaaggcgaatattcctcgctcggcggtagagtgaatgaaggtacagagcatgaagtcgtcattcaggaatcggtatttacccgccgtggtgtcgatcgcattttgcgttatgccttcgaacttgcgcaaagccgtccacgtaagacactaacttctgccactaaatcgaacggtttagccatcagcatgccgtactgggatgagcgagtggaagcaatggccgagaattacccggagatccgctgggacaagcagcatattgatattctctgcgcgcgttttgtgatgcagccggaacgattcgatgtggtggtggcgtccaatttgtttggcgatatcctttccgatcttggcccggcctgcaccggcaccattggcattgccccatccgccaacctgaatccggaacgcactttcccgtcgctcttcgagcctgtccacggttccgcgccggatatctacgggaaaaatattgctaaccctatcgccacgatttgggccggggcaatgatgctcgattttctcggcaatggcgatgagcgtttccagcaagcgcataacggtattctggcagcaattgaagaagtgattgctcacgggccgaaaacacctgatatgaaaggcaatgccaccacgccacaggttgccgacgcgatttgcaaaattattttgcgttaaggtcaaaccagtttatttgaaccgcgtcactgacgcggtttttttattcgttctttgcagtaaataacctgcgtcatttcaccttttattgtttccgtttcgtgttttatggctttccgtattcttaattgtttaatttatgtaacatgcaaattttgttacgcgtacgttaggttccgccgtacaggtattggttttgctggcaatgggactggtgatttatttagccaccagtaaatacggcaatattcgtcttggcgaaggaaaaccggaatacagcacgctctcctggctgtttatgtttatttgtgccggtttaggttcttctacgctttattggggggttgctgaatgggcctattattatcaaacacctggattaaatatcgcaccgcgttcacaacaggcactcgaatttagcgttccctactctttcttccactggggcatcagcgcctgggcaacttatacgctggcctcattaatcatggcttatcactttcatgtgcggaaaaacaaaggtctgagcctttccggcattattgctgctattaccggcgttcgcccgcaaggcccatggggaaaactggtcgatttgatgttcctgatcgccactgtcggcgcactgaccatttcccttgttgttaccgcagcaacctttacccgtgggctttccgcgctgaccggtttacccgataacttcaccgtgcaggcatttgtgatcctgctttccggcggcattttttgcctaagctcgtggattggtatcaacaacggtttgcaacgtctgagcaaaatggttggctggggcgcgttcctgctgccattactggtgctgattgtcggcccaaccgaatttattaccaacagcatcatcaatgccatcggcctgaccacgcaaaacttcctgcaaatgagcttattcaccgatccgcttggcgatggttcatttacccgcaactggaccgttttctactggctgtggtggatctcatacacccctggcgtagcaatgtttgtcacccgcgtttcccgcggtcgtaagattaaagaagttatctggggactgatcctcggcagcaccgtcggttgctggttcttctttggcgtaatggaaagctatgccattcatcagtttatcaatggcgtaatcaacgtcccacaggtgctggaaacactgggcggcgaaacagctgtacagcaagttctgatgtcgttgccagccggtaaattgttcctcgccgcatacctgggcgtgatgattattttccttgcctcgcatatggatgcagtggcctacaccatggcggcgaccagtacgcgtaatctccaggaaggtgacgatcctgaccgtgggctgcgtcttttctggtgcgtggtgatcactctgatcccgctttccatcttgtttaccggtgcttcgctggaaacgatgaaaaccaccgtcgtgctcacagcccttcccttcctcgtcattttactggtgaaagtcggcgggtttattcgctggctgaaacaggattacgccgacattccggctcatcaagttgaacattatctcccgcagacaccggttgaagccctggaaaaaacgccagtgctccctgcgggaaccgtattcaaaggcgacaactgagcgccatcatcctaacgataaaggtatccctatgagcaatctgagccctgactttgtactacccgaaaatttttgcgctaacccgcaagaggcgtggaccattcctgcccgtttttataccgatcagaacgcgtttgaacacgaaaaagagaacgtcttcgccaaaagctggatttgcgtcgctcacagcagcgaactggcgaatgccaatgattatgtgacgcgtgagatcattggcgaaagcatcgtgctggtacgcggtcgtgataaggttttgcgcgcgttctataacgtgtgtccgcaccgtggtcatcagttgttgagcggtgaaggaaaagcaaaaaatgtgattacctgcccgtatcacgcatgggcattcaaactcgatggcaacctggcccatgcacgtaactgcgaaaacgtcgccaatttcgatagcgacaaagcgcaactggttccggtgcgtctggaagaatatgccggattcgtcttcatcaacatggaccccaacgccaccagcgtagaagatcaattacccggcctgggcgcgaaagtgctggaagcctgcccggaagtccacgatctgaaactggcggcccgctttaccacccgcacgcctgccaactggaagaacattgtcgataactatctcgagtgctatcactgtggtccggcgcatccaggtttctccgactccgtacaggttgatcgttactggcacaccatgcacggtaactggacgctgcaatacggtttcgccaaaccgtccgaacagtcgtttaaatttgaagagggtacggatgcggcattccacggtttctggctgtggccgtgcacgatgctgaacgtcaccccgatcaaagggatgatgacggtcatttatgaattcccggtggattctgaaactaccctgcaaaactacgatatttacttcaccaatgaagagttaaccgacgagcaaaaatcgctgattgagtggtatcgcgatgtgttccgtccggaagatttacgtctggttgaaagcgtacagaaagggctgaaatcgcgtggctatcgtggtcaggggcgcatcatggccgacagtagcggtagtggcatttccgaacatggtatcgcccatttccataatctgctggcgcaggtgtttaaggactaatgacatcggcggcggtattttccgccgctgggctgatttttgatggagtacagcaatgtcagactatcaaatgtttgaagtacaggtgagccaggttgaaccccttaccgaacaggtgaaacgcttcacgctggtggcaaccgatggcaaaccattacctgcgtttaccggaggaagtcacgtcattgtgcagatgagcgatggtgataaccagtacagcaatgcgtattcactactgagttcgccgcatgacacctcttgttatcagattgccgttcggctggaggaaaactcgcgcggcggttcccgctttttgcatcagcaggtaaaagtgggcgatcggttaacgatttcaacgcctaataacctgtttgcgctaattccctcagccagaaagcatctgtttatcgcgggcggtattggtatcacccctttcctgtcgcacatggcagagctgcaacacagcgacgtcgactggcagctacattactgctcgcgaaatccagaaagttgcgcatttcgtgatgagctagtccagcatccgcaggctgagaaagtccatttgcatcattcatcaaccggaacacgactggaattagcgcgattattggcggatatcgaacctggcacacacgtttatacctgtggccccgaggcgctaattgaagcggtaagaagtgaagctgcgcgtctggacatcgccgccgatacgctgcactttgagcaatttgctatcgaagacaaaaccggcgatgcatttaccctggtgcttgcccgttccggaaaagagtttgtggtgccggaagagatgactattttgcaggttattgaaaataataaagccgcgaaagtggaatgtttatgtcgtgaaggggtatgcggaacctgcgaaacagcaatactggaaggtgaagctgaccatcgggatcaatattttagcgatgaagagcgtgccagccagcaaagtatgttgatctgttgttcgcgtgcgaagggtaaacgcctggtgttggatttgtagtttgccgaagccggatgtggcgctgagcgcgcccagtccggcttcggaagattttactgcggatattcctgcaataaattgtgtaatgcttccgccatcagctcaccacgccagccggaaatcagctccggcaaattgttctgcggtttcagtttccagtgccagttcagcagttggttgatttgccgacgcgatgccagcaattcggcgctgatcttatgcgtttcgctcacgtcagtaatcagcgacttaatcgctttaaacgctttacgataacccggcatgtccatcaggttaagcatcggctgcggtaaggcatcttccggcaatgtctgcgctttttccaccagcgctagcagcgttttaccgtgaaagcggatttcgctaccggataaacccaggctgtccagttcgcctaaacttcccggcatataacgcgctaccgaccacaaatgctcttcacgcacgacaaagttcaccgccagatcgcgctctcgcgccttgcgcagtcgccagtcggctaacagttgcagacaggccagttggcgtgtgcgtaattgccaggcattggtgatatcacgccaggcatcttccggcgcaacgacttcctgacgacgcatttgcatcaggcggcattcatccagcgccgcaggtagccagccggaggcctccgtttctaccataagcttggcggtgatcggtaacagataccagacatccgccgctgcgtattcacactgacgttcggtcagcggtctggccagccagtcggtgcgcgattcactcttgtccagcgtaacgccggaatactcttccaccatggaagcgaaaccccatgacatcgggcgtccgcagaaggcagcaaggatttgcgtgtcaatcaagggttgtggtaattcgccaaagacattgaggaacacttccagatcttcactgcctgcatggagaaattttgtgatggacggatcgcgcaggatcgctttcagcggtgaccagtcggtgatcccgagtggatcgattagcgccagatgctcgccatcgaaaagttgaatcaaccccagctgcgggtaataagtgcgcgtacgaacaaattcagtatccagggctatcgccggaaaggcacggacggcttcacacaaagaagccagcgcatcgtccgtggtaatcatttggtaattcaaattgttttctctttagtgggcgtcaaaaaaaacgccggattaaccggcgtctgacgactgacttaacgctcaggctttattgtccactttgccgcgcgcttcgtcacgtaattctcgtcgcaaaatttttccgacgttagatttcggtaactcatcacgaaactccaccagcttcggtactttgtatcccgtgagctgacggcggcaaaaagtcaccagtgactcttcggtaagcgatggatcttttttcactacgaagattttcaccgcttcaccactggagccggaaggtacgccaacagccgcgacttcctgtacgccaggatgctgcatgacgacatcttcaatctcgttgggatagacgttaaaaccggaaaccagaatcatgtcttttttacgatcgacaatgcgcaggaatccttcttcatccattaccgcgatgtcgccggtgtgtaaccagccatttttgatgatttcatcggtagcatcgggacgctgccagtaacccagcatcacctgcggtcctttgacacaaagctcacccggttgacctggtggtacttcattatcatcatcatccaccagtttggcttccgtcgacggcaccggcaaaccgatgctaccactatgataatcaatatcatatgggttaacgctgaccagcggcgcacactcggtaaggccatagccttccagcagatactgtccggtcagtttcacccaacgctctgccaccacttgctgcactggcatcccaccgcctgcggaaagatgcagactggagaaatccagctgctggaactctttattgttcagcaacgcattgaacaaggtgttaacgcccgtgatagcggtaaacggatatttcgctaactcttttaccaaccctggaatatcgcgcgggttagtgataagcaggttctgcccacccagttcgataaacagcaggcagttaatggtcagggcaaaaatgtgatacagcggcagcgccgtcaccaccagctctttgcccggatgcaacagcggaccataggtcgcgttaacctgttccaggttcgccagcatattgcggtgagtcagcatcgcgcctttcgccacaccagtggtgccgccggtgtattgcagaaaagctaaatcttccggcaccagttcgggtttgacgtactgcatccggtagccgttatgcagtgcgctacgaaatgaaatggcatctggcagatggtatttcggcaccaaacgcttgatgtatttaacaacgaaattgactaccgtgccttttgccgtagatagctgatcgcccatacgggtcagaattacgtgctgaacggcggttttatcaaccactttttccagtgtgtgagcaaagttagacacgataacaatcgccgatgcgccgctatcgttaagctgatgctcaagctcacgcggggtatacaacgggttaacgtttacgacgatcatcccggcacgcaaaatgccaaacagcgccaccggatattgcaataaattaggcatcatcaacgcaacgcgatcgcctttcttcagccccaacccttgttgcaaataagcggcaaacgcgcgactgcgttcttccagcttgcggaaggtcattacctcccccatattcacaaacgcaggttgatcggcgtagcgcgcgaccgactgctcaaacatatctaccagagattgataacggtcagggttgatctccgtcggaacgtccgcgggataacggttaagccaaaccttcttcaattcttcacctctaaaatgcgtgttcgtcgtcatcgcaaccccaaatgatatacatgccgttaacataatattaactcatcataccagcttgataattacccaacgaaaaggttgcgaagcgcgtcactatttatttttatctttaccgtaagaatgcagaaacagcggaccagccgctgtttctttttctttaaaaacaagcaattattcagttacaactgtttgtactctcgcggggccgggattataccagccccatccgccgtagccatagggccagccacgaccgccataaaaccatggatcaatcggctgaggcggcataatcacctgctgggttaaatgccaacgtttgtaacccgttacttgcatcaccataaatttatagggcgtattgccgattttgccgtcaaccgcaccagtgattggcccgactaccgtaaccagttgtccacggaaatccaccgggtccagaaaaccgttcacatcggcataaatgcgaccgcgagaaggttctcccagcgtcggtctggctccgctgtccagcggtacggtagcaatttccaggcgagttttcccttgctggttttgtaccgcaaccactttgccaccaaagcgtgcctcctgaccaacgtacagctgcggcgcactcatcacccgaactaaatcttgttgcggcgtgggactgctgcctttaatggcgtccggcacagtgacacaaccgctcagcattagcgcaaacgtacctgccagtatgcctttgataacattcttttgaaccgccatggtgcgactcctttttttctcagggcatactcttaagattcattctttgcccggaagtttcttccatgcgacgttgttacgtaaataaaccggttcggcatgttccaccgccaccgttttaccctcagcaaacatctgacacgcaatcggcagcatatcttcagcagcaggcagtaacacttcgccatcgcgcaaaaccagcccgctctctttaccgagatccggccaagcttgccagcccgtccctaccgtcacccattcgccggaaagctgttgcattcgttcatggacgatttcgggtttgagtacggcttcggtttcttcaccgtgccagataccgttttcatcacgctgatattcggcccagtaaacttcgcccattcgcgcgtcaatggctgccagcacgcgggttgcgccgtttttgcgccacgccccttgcgccatcgtcattagcgtggagacgccaatcatcggtaattccgcgccaagcgccagcccttgcgcgatgccaataccaatgcgcacgccagtaaagctaccggggccgcgcccgtaagccagagcgttaatatcagtcagggaagttccgctggtggtcaggatatcctgcaccatcggtaagattcgttgagtatgttcacgagggcaaagctcaaaatgagcgttgacagtaccgtcgttccacagggcgacagagcaggcctctgtcgcggtatcgatagccagaattcgcatgggtcttcgtgcttagatcaataaaaaggcgcgcatcataccatactccgtaacaaattacctggaggatggtatcgcaaggaaacgaaccgcacgggcaatgtcacgggtgcgtggcgcgggcggcagactggcgagaaacgtcgcgccgtaaggacgcatcaccagccgattgtcacaaatcaccagcacgccacgatcgtcggcgtcgcgaatcagtcgccctaccccctgtttgagagtaatgacggcatctggtagttgcacttcatcgaacgggtcgccaccgcgcaaacgacaatcttccatgcgcgcttttaacagtggatcatccggcgaggtaaacggcaatttgtcgataattaccaatgacaatgtatcgccacgcacgtccaccccttcccagaaactgctggttgccacaagaagcgcattaccggcgctgacaaattgctgcaacagttgccctttgctggtttccccctgcaacaatacaggaagcgtcatggtagcgcggaactgctcggccagatcgcgcatcatggcgtgcgaggtacaaagcataaaacaacgaccgttgttagcttcgatgatcggtcgcagcattgccgctaactggcgagcagaacctggctggttggtttgcggcagattgcgcagcacacagagtaacgcctggcggctgtaatcaaatgggctgggcaacagcaacgactcggcctgttcgatgccaagccgcgaggtgaaatgatgcagatcgtcgttcaccgacagcgttgctgaggtgaagatccagctaccgggtttttgcgccattaactctttgaatttatccgccacgctgagcggcgtgagagccagagtaaaatggcgcgaagtgcattcgtaccagtagctgtagcccggctgattgatctcttttagccgcttcagccgtgtgcgatacaacgtggcgcgctcaaatgccgcatccagcaaggcggaacgccccagtgacagtttcgccacgtcataacaaagttccagggtgtcatcgagcagtaaaaatgcccgctgaatttgcggattagctaacagctcacgcaggttaccgcgataacctggctcaccgagttgcagacgaaaatcctgcgcactctgggcaagacgatcagcgcacttttgtaactgctgggtgtcttttaattcggtgcggtaggcgatggtgatgtcttttgccaggtcgagcagttgtcgactggagagtgactgaccaaaatactggctggcaatgtccggtagctggtgggcttcgtcgaagatcatgacgtccgcttccgggatcagttcgccaaatccactctctttaaccaccatatccgccagaaagagatgatggtttaccaccaccacatcggcgtccatcgcttttttacgtgctttgaccacaaagcaatctttatacatcgggcagtcgctgccaagacagttgtcgttggtgctggtgaccagcggccacgcctgtgaatcttccgccacgctgacgcaggtgctgatatcaccatcgactgtttgattagaccaggagcgcagcaggatcacatcgcttaagatttgtaccggcagatcgccccccgccagcgcctgctgttcgagacgttcgaggcagaggtagtttgagcgccctttcagcagcgccacgttgcccgtatatttcaatgcctttgagactgttggcaaatcgcggctgtagagctgatcctgcaacgcttttgagccggtcgagataatgactttctttttcgcccgcagcgcaggagccaggtaagcgtaggttttgcccgtaccggttcctgcttccaccaccagcggctggcctttttctatcgcctgggtgacggctaccgccatctgtcgctgtggttctcgcggcttaaagcctggtatcgctttcgccagctgaccgtctggtgcaaaatcgtccgtcacactaccccctgttgatttgaacagggattatgtcaggatgagggcgctttcgccagttgaagtggtgacggcgacctcacattgtggcagtctttgcagcacgaaaatggaagtataatgaggacaaaatgatgactatcgttcgtatcgatgctgaagcccgctggtctgatgtagtaatccacaacaacacgctctactacactggtgtaccggaaaacctcgacgccgatgcctttgagcaaaccgccaacacgctggcacagattgacgccgtgctggaaaaacagggcagcaataaatcgagcattctggatgccaccattttcctggccgataaaaacgacttcgcggcgatgaataaagcgtgggatgcttgggttgtcgcgggtcatgcgccggtgcgctgcacggtacaagcgggtttgatgaacccgaagtataaagttgaaattaagattgtggctgcggtgtaagctttatcgaagcaaaataagtcagacgataatttatcgataatactggtcggttttacataaatcgaccagagaataagatattactgttgatgcttctgctaattcattatttatatttataatttcaattttatctataaaactaactatataaataaacataaacatgccgttgtgttcgccctttgattagcaactctggttttctttcttagctgaacaatctggttatagcgtgcggactgaccgttaaatttctccatcttactggataacacaccatgagctgctacctttaaaacacctgaatgtcaacaggttaactcgtgccatatcgttataatccctttgatattagatgcaaattaaggtcatatatagccttatcgataacatggttaattttaaggataagaatatgcctgctgtaatagataaagccctggatttcattggtgccatggatgtatcagcgccaacaccaagttcgatgaatgaaagcacggcgaagggaatctttaaatatttaaaagaactgggagtacccgcgagtgccgctgatattacggcgcgagctgaccaggaaggctggaaccctgggttcacggaaaaaatggttggatgggcaaaaaaaatggagacaggtgaacgttctgtgattaaaaatcctgaatacttttcaacatatatgcaggaagaactaaaagcactggtctgagttaaatttatatcagcataaatgggtcaggacgcttttaatcacatataaaaagcgtcctttttctcacaatcaaatgatcatcggcttctataacgaaatcgatacggattagtgtgttactcgtcttcatcctcaaaacgcgccacgattcgctcgccggagtggttggcacgcagctcttctgccaccagcgcgattgcctggccgctgctcatcccttgtgccatcagttcctggatccgctcgacagctttttgctgctgttcatgggtgagtgaaggtaaacctgcaaacattgttaactcctgctaaattgttggcgctaattatttcatgctacccggcacatagccagtagagtcaggactgatgaagacgttatctcccgctgtgattactttaccctggcgtcaggacgccgctgaattttatttctcccgcttaagccacctgccgtgggcgatgcttttacactccggctatgccgatcatccgtatagccgctttgatattgtggtcgccgagccgatttgcactttaaccactttcggtaaagaaaccgttgttagtgaaagcgaaaaacgcacaacgaccactgatgacccgctacaggtgctccagcaggtgctggatcgcgcagacattcgcccaacgcataacgaagatttgccatttcagggcggcgcactggggttgtttggctacgatctgggccgccgttttgagtcactgccagaaattgcggaacaagatatcgttctgccggatatggcagtgggtatctacgattgggcgctcattgtcgaccaccagcgtcatacagtttctttgctgagtcataatgatgtcaatgcccgtcgggcctggctggaaagccagcaattctcgccgcaggaagatttcacgctcacttccgactggcaatccaatatgacccgcgagcagtacggcgaaaaatttcgccaggtacaggaatatctgcacagcggtgattgctatcaggtgaatctcgcccaacgttttcatgcgacctattctggcgatgaatggcaggcattccttcagcttaatcaggccaaccgcgcgccatttagcgcttttttacgtcttgaacagggtgcaattttaagcctttcgccagagcggtttattctttgtgataatagtgaaatccagacccgcccgattaaaggcacgctaccacgcctgcccgatcctcaggaagatagcaaacaagcagtaaaactggcgaactcagcgaaagatcgtgccgaaaatctgatgattgtcgatttaatgcgtaatgatatcggtcgtgttgccgtagcaggttcggtaaaagtaccagagctgttcgtggtggaacccttccctgccgtgcatcatctggtcagcaccataacggcgcaactaccagaacagttacacgccagcgatctgctgcgcgcagcttttcctggtggctcaataaccggggctccgaaagtacgggctatggaaattatcgacgaactggaaccgcagcgacgcaatgcctggtgcggcagcattggctatttgagcttttgcggcaacatggataccagtattactatccgcacgctgactgccattaacggacaaattttctgctctgcgggcggtggaattgtcgccgatagccaggaagaagcggaatatcaggaaacttttgataaagttaatcgtatcctgaagcaactggagaagtaagacgtggaataccgtagcctgacgcttgatgattttttatcgcgctttcaacttttgcgcccgcaaattaaccgggaaaccctaaatcatcgtcaggctgctgtgttaatccccatcgtccgtcgaccgcaaccggggttgttgctgactcagcgttcgattcatctgcgtaaacacgctggacaagtggcattccctggaggtgcagtcgatgacacggacgcatcagctatcgccgccgcgctgcgcgaagctgaagaagaggtcgctataccgccttccgccgttgaagttatcggcgtgctgccgcccgtcgatagcgtcactggctaccaggtaaccccagtggtcggcattatcccgcccgatctgccgtatcgcgccagtgaagatgaagtctcggcggtgtttgaaatgccgctcgcccaggcattacatctgggtcgttatcaccctttagatatctaccgccgtggtgattcacatcgggtatggctgtcctggtacgaacagtattttgtatggggaatgaccgcaggcataattcgtgagctggcgctgcaaattggtgtgaaaccctgactatacttatctttacatctacaaaacactacttgagacaatcatcgcaatattagttaaatcgcggtttttgattagtttaattcatgtgaatagttaagccagtcgccgcgttccctcttacactatgcgctgttattagttcgttactggaagtccagtcaccttgtcaggagtattatcgtgattagtctattcgacatgtttaaggtggggattggtccctcatcttcccataccgtagggcctatgaaggcaggtaaacagttcgtcgatgatctggtcgaaaaaggcttactggatagcgttactcgcgttgccgtggacgtttatggttcactgtcgctgacgggtaaaggccaccacaccgatatcgccattattatgggtcttgcaggtaacgaacctgccaccgtggatatcgacagtattcccggttttattcgcgacgtagaagagcgcgaacgtctgctgctggcacagggacggcatgaagtggatttcccgcgcgacaacgggatgcgttttcataacggcaacctgccgctgcatgaaaacggtatgcaaatccacgcctataacggcgatgaagtcgtctacagcaaaacttattattccatcggcggcggttttatcgtcgatgaagaacactttggtcaggatgctgccaacgaagtaagcgtgccgtatccgttcaaatctgccaccgaactgctcgcgtactgtaatgaaaccggctattcgctgtctggtctcgctatgcagaacgaactggcgctgcacagcaagaaagagatcgacgagtatttcgcgcatgtctggcaaaccatgcaggcatgtatcgatcgcgggatgaacaccgaaggtgtactgccaggcccgctgcgcgtgccacgtcgtgcgtctgccctgcgccggatgctggtttccagcgataaactgtctaacgatccgatgaatgtcattgactgggtaaacatgtttgcgctggcagttaacgaagaaaacgccgccggtggtcgtgtggtaactgcgccaaccaacggtgcctgcggtatcgttccggcagtgctggcttactatgaccactttattgaatcggtcagcccggacatctatacccgttactttatggcagcgggcgcgattggtgcattgtataaaatgaacgcctctatttccggtgcggaagttggttgccagggcgaagtgggtgttgcctgttcaatggctgctgcgggtcttgcagaactgctgggcggtagcccggaacaggtttgcgtggcggcggaaattggcatggaacacaaccttggtttaacctgcgacccggttgcagggcaggttcaggtgccgtgcattgagcgtaatgccattgcctctgtgaaggcgattaacgccgcgcggatggctctgcgccgcaccagtgcaccgcgcgtctcgctggataaggtcatcgaaacgatgtacgaaaccggtaaggacatgaacgccaaataccgcgaaacctcacgcggtggtctggcaatcaaagtccagtgtgactaatacttcttactcgcccatctgcaacggatgggcgaatttatacccgctttctcgtctgctgtaatattccccactacacttccactgttgcgtcaggcgtttgtcgccatacgcttacagggtggcccgcatgcaaaaagcacaacggatcattaaaacctatcgtcgtaatcgaatgattgtttgtacgatttgcgcactcgttacgctcgcttcgaccctgagcgtgcgatttatttcacagcgtaacttaaatcaacaacgggtagtacaattcgccaatcacgctgtagaggaattagataaagtactgcttcccctacaggcaggtagcgaagtcttgcttccgctgattggtctgccctgctctgtcgcccatttgccattacgtaaacaggcggcaaaactccaaactgtgcgatccattggcctggtgcaagacggcacactttattgctccagcatttttggttatcgcaatgtgcccgtcgtggacattctggctgaacttcctgcaccgcaaccacttttacgcctgacgatcgaccgtgccctgattaaaggcagtccggttttgattcaatggacgcctgcagcgggcagtagcaatgctggggtcatggagatgattaacatcgacttactgacggcaatgctgcttgagccacaactgccgcaaatcagtagcgccagcctgacggtggacaaacggcatttgctctatggtaatgggctggtagattcccttccgcaacctgaagacaatgaaaactatcaggtttcttcgcaacgctttccttttaccattaacgttaatggtccgggggctacggcgctggcatggcactatcttccaacacaattaccgctggcggtgctgctaagtttactggtgggctacatcgcctggctggcgaccgcttaccgaatgagcttttcccgcgaaatcaatctgggcctggcgcaacatgagttcgaattgttctgtcagcctttgcttaatgcgcgcagccagcaatgtattggtgtagagattttgctgcgctggaacaatccgcgtcagggctggatttcaccggatgtgtttattcctatcgcggaagaacatcatttaattgtgccactgacccgctatgtgatggcagaaaccattcgtcagcgccatgttttcccgatgagtagtcagtttcatgttggcattaacgtcgcacccagccattttcgccgtggtgtgctgataaaagatctcaatcagtactggtttagcgctcacccgattcagcaactgatcctcgaaatcaccgaacgcgatgccttactggatgttgattatcggattgcccgcgagctgcatcgtaaaaacgtcaaactggcgattgatgacttcggcaccggcaacagctcgttttcctggcttgaaacattacgtcctgacgtgctgaaaattgataagtcatttaccgcagctataggttctgacgcggttaactcgacggtgaccgatatcatcatcgcgctggggcaaagactgaatattgaactggtggcggagggcgtggaaacgcaagaacaggcgaagtatttgcgccgtcatggcgtgcatattttgcaagggtatttgtacgcacagccgatgccgctacgtgattttcccaaatggctggcgggcagccaaccgccgcccgcccggcataatggacatatcacgcccattatgccgttacgttaacgcttactcatcttcatcgtgcgccggttgctctttaacaatgcgaaccagatcaacacgataatcattggcttcaatgatggtgatatgcagtggccctacatcaatcacatcgcccacacggggaatgtgaccatttgccgagatcacgaggcccgcgaccgtcgcgatatcatcgtcatcggcaaggtgctcaacatcaagcgcctgctgcaaggcatgcaaatctgtaccgccttttaccagccagccgtcaccatcagtaatgatttccggcgtttcgtcagcgtccgggaattcacccgcaatggcttccagcacatccagcggcgtgaccagaccttgtaccacaccaaactcgttggtcacgataacaaagctcccgcgagcacgacgcagcacgcccaacaggttgatcggatcgagggtttccgggacgataatcgccggagacgccgaagcaatcgccgccacatcaacgccctcttccagcgccaccagcagttctttagcacgtacaataccgatgatttcatccagttcaccgcgacataccgggaacagactgtgcggtgaagagagcagttgctcgcggatttcatcgaccccgagattagcgtcaacccagcttatttcaccgcgcggcgtcatgatcccgcgcagagaacgcgacgccagcgtcagtacgccgttaatcatgtaacgttcttcttcggcaaatgcaccttccgggatcggcatcggcatcgggttatcggcatcgtgctgaacattggcctgacgtttcccgcccatcaaacgcaggatggcatcggcagtacgcgctcgcagcggcaaagtcgactggtggcgaataaagttgcgacgcgcaatctggttaaacacttcgatgatgatcgagaagccaatcgcggcatacaggtaacctttcggaatgtggaaaccgaaaccttctgccaccagactcagaccaatcattaacaggaagctcagacagagcaccaccaccgtggggtgctggttaacgaatcgcgtcagcggtttggatgccagcaacataaccgccatcgcaatcactaccgccgccatcatcaccggcagatggttaaccatccctactgcagtaattaccgcatccaacgagaagacggcgtcaaggatgacaatctgtgtgacgaccacccagaaactggcgtagcctttaccgtggccggaatcatgatcgcggttttccagccgttcatgcagttcggttgttgctttgaacagcaagaatatccccccgaacaacataatcaggtcgcgtccggagaaggagaaatccatgacggtaaatagcggtttggtcagcgtgaccatccatgaaatcagcgacagcagccccagacgcataatcagcgccagtgataaccccagcaaacgcgctttatcgcgttgttttggcggcagtttgtcagcaagaatggcgatgaagaccaggttatcgatacccagcacaatttcgagaacaacaagcgtgagtagccccgcccaaattgaggggtccattaagaattccatgacaagctcctgcttaaggaatagctattcgacgccagaaataatgcaggcgtaacgacaaaatgcaaacgaaaggtgcggcatagagtgccagaaaggcaggcgttaaaaggcctgatgctgaaatgacgtcggtgacgatccatactgcgggctactgccctatactccatggttgttaaacgggagttaaacatatcagagacgcctctgatttggcaaagatttaccttcctttgcaaacgaatgtgacaaggatattttacctttcgaaatttctgctaatcgaaagttaaattacggatcttcatcacataaaataattttttcgatatctaaaataaatcgcgaaacgcaggggtttttggttgtagcccttatctgaatcgattcgattgtggacgacgattcaaaaatacatctggcacgttgaggtgttaacgataataaaggaggtagcaagtgaccattgctattgttataggcacacatggttgggctgcagagcagttgcttaaaacggcagaaatgctgttaggcgagcaggaaaacgtcggctggatcgatttcgttccaggtgaaaatgccgaaacgctgattgaaaagtacaacgctcagttggcaaaactcgacaccactaaaggcgtgctgtttctcgttgatacatggggaggcagcccgttcaatgctgccagccgcattgtcgtcgacaaagagcattatgaagtcattgcaggcgttaacattccaatgctcgtggaaacgttaatggcccgtgatgatgacccaagctttgatgaactggtggcactggcagtagaaacaggccgtgaaggcgtgaaagcactgaaagccaaaccggttgaaaaagccgcgccagcacccgctgccgcagcaccaaaagcggctccaactccggcaaaaccaatggggccaaacgactacatggttattggccttgcgcgtatcgacgaccgtctgattcacggtcaggtcgccacccgctggaccaaagaaaccaatgtctcccgtattattgttgttagtgatgaagtggctgcggataccgttcgtaagacactgctcacccaggttgcacctccgggcgtaacagcacacgtagttgatgttgccaaaatgattcgcgtctacaacaacccgaaatatgctggcgaacgcgtaatgctgttatttaccaacccaacagatgtagagcgtctcgttgaaggcggcgtgaaaatcacctctgttaacgtcggtggtatggcattccgtcagggtaaaacccaggtgaataacgcggtttcggttgatgaaaaagatatcgaggcgttcaagaaactgaatgcgcgcggtattgagctggaagtccgtaaggtttccaccgatccgaaactgaaaatgatggatctgatcagcaaaatcgataagtaacgtattgtgttgattatcactcagttttcacacttaagtcttacgtaaacaggagaagtacaatggagattaccactcttcaaattgtgctggtatttatcgtagcctgtatcgcaggtatgggatcaatcctcgatgaatttcagtttcaccgtccgctaatcgcgtgtaccctggtgggtatcgttcttggggatatgaaaaccggtattattatcggtggtacgctggaaatgatcgcgctgggctggatgaacatcggtgctgcagttgcgcctgacgccgctctggcttctatcatttctaccattctggttatcgcaggtcatcagagcattggtgcaggtatcgcactggcaatccctctggccgctgcgggccaggtactgaccatcatcgttcgtactattaccgttgctttccagcacgctgcggataaggctgctgataacggcaacctgacagcgatttcctggatccacgtttcttctctgttcctgcaagcaatgcgtgtggctattccggccgtcatcgttgcgctgtctgttggtaccagcgaagtacagaacatgctgaatgcgattccggaagtggtgaccaatggtctgaatatcgccggtggcatgatcgtggtggttggttatgcgatggttatcaacatgatgcgtgctggctacctgatgccgttcttctacctcggcttcgtaaccgcagcattcaccaactttaacctggttgctctgggtgtgattggtactgttatggcagtgctctacatccaacttagcccgaaatacaaccgcgtagccggtgcgcctgctcaggcagctggtaacaacgatctcgataacgaactggactaacaggtgagcgaaatggttgatacaactcaaactaccaccgagaaaaaactcactcaaagtgatattcgtggcgtcttcctgcgttctaacctcttccagggttcatggaacttcgaacgtatgcaggcactgggtttctgcttctctatggtaccggcaattcgtcgcctctaccctgagaacaacgaagctcgtaaacaagctattcgccgtcacctggagttctttaacacccagccgttcgtggctgcgccgattctcggcgtaaccctggcgctggaagaacagcgtgctaatggcgcagagatcgacgacggtgctatcaacggtatcaaagtcggtttgatggggccactggctggtgtaggcgacccgatcttctggggaaccgtacgtccggtatttgcagcactgggtgccggtatcgcgatgagcggcagcctgttaggtccgctgctgttcttcatcctgtttaacctggtgcgtctggcaacccgttactacggcgtagcgtatggttactccaaaggtatcgatatcgttaaagatatgggtggtggcttcctgcaaaaactgacggaaggggcgtctatcctcggcctgtttgtcatgggggcattggttaacaagtggacacatgtcaacatcccgctggttgtctctcgcattactgaccagacgggcaaagaacacgttactactgtccagactattctggaccagttaatgccaggcctggtaccactgctgctgacctttgcttgtatgtggctactgcgcaaaaaagttaacccgctgtggatcatcgttggcttcttcgtcatcggtatcgctggttacgcttgcggcctgctgggactgtaagactgttgtacactaccggggccttttggccccgtttttttatctggaggattaatgacaatcacggacctggtactgattcttttcatcgccgcactcctggccttcgcgatctacgatcagttcatcatgccccgccgtaacggccccaccctgctggcaattcctttgctccggcgtggtcgcatcgatagcgttatcttcgtcggattgattgtcattcttatctataacaacgtcacgaatcatggtgcgttaataacgacatggttattaagcgcactggctctgatgggtttttatatattctggatccgcgttccgaagatcatctttaaacaaaaaggttttttcttcgccaatgtctggattgaatatagccgaatcaaagcgatgaacttgtcggaagatggcgtgttggtgatgcaattagaacagcgtcggctgttaatccgcgttcgaaatatcgacgatctggaaaaaatttataagcttctcgtttcaactcaataagttatgaatttagccaaagctatgtttagtgtatttttaataatcagacatagcttaggctatattacctcttcccttatttgttatttattttaacgtttcattgatatataaatccaaatgaaaatcgttatcaataaagcaatgaaataatatattccaacagttgttttatattctcaaaatatgttaaggttgcgccctcatttggggagtagccgatttccagattccggaaatgtacgtgtcaacatactcgttgcaaaacgtggcacgtacggactgaatactttcagtcaggcgagaccatatgcacatcaatcgctatgcctgcatgaacgcgaaaaccatcacggcttgttgttcatgtatgcatgtttgctgggggcgatgatgtgttttatggataccccggtcaggacattgtcatgaatatcactgctactgttcttcttgcgtttggtatgtcgatggatgcatttgctgcatcaatcggtaaaggtgccaccctccataaaccgaaattttctgaagcattgcgaaccggccttatttttggtgccgtcgaaaccctgacgccgctgatcggctggggaatgggcatgttagccagccggtttgtccttgaatggaaccactggattgcgtttgtgctgctgatattcctcggcgggcgaatgattattgagggttttcgtggcgcagatgatgaagatgaagagccgcgccgtcgacacggtttctggctactggtaaccaccgcgattgccaccagcctggatgccatggctgtgggtgttggtcttgctttcctgcaggtcaacattatcgcgaccgcattggccattggttgtgcaaccttgattatgtcaacattagggatgatggttggtcgctttatcggctcaattattgggaaaaaagcggaaattctcggcgggctggtgctgatcggcatcggcgtccagatcctctggacgcacttccacggttaataagaacgctgccagaggtgaatattaaagtccgtctggcagtcgaacacttcttttgctgccagtgtttgccagacttctggcttcgcacgccaggcaaacggcgtcatctgcaataatgcgacggcttcatcaccgcgaagacgcatcggataacacaactccgcactctgctgtaatgtaaaaccttccagttgttctgcatgaggtgcatgaagatgtacttcattgtaaatcagccccttcagctccatcaaatgtcgcggtcccggcgtggcagtaatgacccagccgccgggcttcactactcgtgctaattcttctgctttacacggcgcgtaaatacgtattatggcgtccatactggtatcggaaaacggcaaacggtggctggaagcgacacaaaaagtgacctgcggatagcgtttcgccgccgcttttatcgctaccttcgaaacatccagaccaaacgtggtgatttcgggcaacgcatcggcaaatgcgtgtgtgtaatacccttcaccacagccaatatccagcaccgccgtggccttatcatcaagccgttccctcagttgggcgacaattgcatcacgcagcggctgataatgtccggcatctaagaatgcgcggcgtgcttgcatcatttccgcgctgtcgcccggatcacgagaccgtttatgctgaacgggcagcagattgacatacccttctttcgccatatcaaactgatgtcgctggggacagatatagctgtttttttcacgcgaaagaggctgatggcaaagtggacaggaaaaagacatgacaactccggcaggatactaaaggccgcaagtgtaacgcgaatcacgcggcgggcaaatatccgaacgccaggagcgaagataaagcatagtaaaaagcctcgcattcgacgaggctttatagcgagattgaagcgtattcacacttcagatcagtggattcgatcagatagctgttacgttaacagctgccggacctttctggccgtcctgaatttcgaactcaacgttctgaccttcagccagagttttgaagccattaccctggatagcggagaagtgtacgaacacatctttgctgccatcagccggagtaatgaagccaaaacctttagactcgttgaaccacttaacctgacctttaatctttgccatttgaaaaattccttagattgttttcttcgcccgcaggcataacatagataaaactgacacattactgcatgaggcaccaatataaggctcggcagagaagcggtattcaacgtcaacgtgtttactcaggacttctttactgaaaatgccacacataaacagaactgtacctcgtttaacccgaaatctgttatcacatacaacgttaattatggcaagccatttttaaacatgtctcgatcagacgcacaaatctcgatacgtcttccactttttttgcacacttatgcaacggaatacgcgccgatatatcattgtgcttaaccttgccagttcaggcagatacttaaactggcgtattttctaacatagttcaataagttcagttgttccaggccagtgggagaagttattacatagtgcgtgcaatatcacattttttgctatgcaatgaataaaaagttatatcactttttctcataaaacagtcagttaacggctattaattaccctaaagagaagtcaatccccaaagggattgtaaatttaaaataagaaaaattgatgaatgagcaaaaaaatcaagagagaaacgtttcgctaataaataataccacgcttaatcacaaatccgatgtaaacatcctaataaattaatggggtaaatatctttttctgatatcccgttacgcaaataaataatatgataattatttgaagtcagaccagagttttaatttgaagcagttgcaccatgacagtgcgtataatcaggatgaattgagtaacccttcaacgacggggttactcaagattgaggaaggattatcgttcggcgaccagacgaataatatcttcgtcttcaaccgatttttgactctcaacggtctttttatctgctttctctggttcgtttgcttcgcacaaacgacgtaacagtgcattttgacgtttttgctgatccagcaacgcctcaagcagttcaatctgttcgttagtccgtgaactggcacgattgataaaaaaccacaagatgagcccgataagaagaaccaccaccgatacaaccaaagacgcaatgttcatcacgcctgaatttacaacttcgttcatttcaccacctctgagtagaggcgctattctaccactgctggagaggaagaaaatctagtgctgaaaaaatgatatcaccacgggataaactggttaatggcacaaattccgctgaaaaattgtacatcctgatcgcacatcatgttgaatacctgcgcccaaagcagcaagcaagccaacaccacgacaaccagaacgacccatcgaaactttttcactccaatctccgtttcacctaccttatgtcattaaactagcatgcgttagttaaacagcgcctaactatgtcgatattcgtgctttttcggaatgagtcgcttgcttcagcgcatattgccgctacgattaagcgaacataaaaagagaagaggttgtaatgcgattcatcattcgcacagttatgctgatagcactggtatggataggattattactcagcggatatggcgttttgattggaagcaaagagaatgccgcaggattaggtttgcaatgtacctatctgactgccagaggcaccagcacggtacaatacttgcacactaaaagtggttttttggggataacagattgcccgctgttacgcaaaagcaatatcgtggtcgataatggttaagggcaataaataaccagattctcactcctgagtaaaatactcttatagcaagcgcgtttaatataacgccaccttcaactttatttttctcatgctaaataaagaacctgtctgtttgatattccgacaggttcttactctcatcagaacggatagtcgtgataacccatttgggcagaaattttgcgcgctgcggtatgcaacattgcgacatattcctgtaaacgctcttcagagaaacgcaacgtcgggaaggagatgctcaaaccggcaatgaccacgccaaagcgatcaaataccggtaccgcaatgcatcgcagcccttcttcctgctcttcattatcttcgccatacccctgctcgcgcacctggtccagaacgggtaataacgcttctgtactggtgatggtccgctcggtactgcgtttatactccacgccctcaagaatttgcttcacttcatcgcgatcgcgccatgccagcagtaccttaccaatcgcggtgctgtacagcggattacgacgcccaatccgtgaatacatgcgcaaattgtacatagagtcaattttgtgaatgtaaacaatactgtcttcgtccagtgcgccgaggtggatagtttctttggtcaggcgggagagctcacgcatctggatatctgcgctacgaattaaatcgacgttttgtaacgcgcgagcgcccagttcaaacaatttcagggtcagggaatatttctccgactccccttcctgcgccacataacctaaggttttcatggtctgtaaaaagcgataaacggtgctttttgacatcatgacgcgctgcgacagctcggttatccctatttcgcgctcttcacccagcgcctgcaaaatgccaaaaacttttagcacggaagatacagaatcaggctgtttatccagatctgcgttagccatttatcacctcattgcgagtgttttataaaaatcagaactgttttttattataatttcgcaccagggtggtcgcaatccatcttttgccggttagttacaattctgcgacatccaccgtgaatatcagtgctagaatcatacccctgttgattattcaccaaagatataaaattcctatgccaaaagttcaggccgacggcctgccattgccccagcgatacggtgcgatattaaccattgtgattggtatttcgatggccgtccttgacggcgcaatcgccaacgtcgccctgccaacaatcgccacggaccttcatgccacgccagccagttccatctgggtagtgaacgcctatcaaatcgccattgtcatctccctgctctcgttttcgtttctgggcgatatgtttggctatcgacgtatttataaatgcggtctggtcgtttttctgttgtcttcactgttctgcgccctttctgattcgctgcaaatgctcacccttgcgcgtgtcatacaaggtttcggcggtgcagcgttgatgagcgttaataccgcacttatccgcctgatctatccacaacgttttctgggtagagggatgggcataaactcgtttattgttgccgtctcttctgctgccgggccgacaattgctgcagcaatcctctccatcgcatcctggaaatggttatttttaatcaacgtaccgttaggtattatcgccctgcttctggcgatgcgttttctgccacccaatggttctcgcgccagtaaaccccgtttcgacctgcccagcgccgtgatgaacgcgttaaccttcggcctgcttatcactgcgttgagtggtttcgctcaggggcaatcgctgacgttaattgctgcggaactggtggtaatggttgttgttggtattttctttattcgccgccagctttctcttcccgtaccgctgctaccggtggatttactgcgtatcccgctgttttcactttctatttgcacatctgtttgctctttctgcgcacaaatgctggcaatggtttccctgcccttttacctgcaaaccgtgctcgggcgtagtgaagtcgaaacaggtttacttctgacaccgtggccgttagcaacgatggtgatggctccgctggcaggctatttgattgaacgcgtacatgcaggattgctgggggctttagggttgttcatcatggctgcggggcttttttccctggttctgctgcccgcgtcacctgcggatatcaatattatctggccgatgatcttatgtggtgctggatttggcttattccagtcacccaataaccacaccattattacctccgcgcctcgcgaacgtagcggtggagccagtggcatgttaggaacggctcgtctactgggtcagagtagcggcgcggcgctggtggcgctgatgctaaatcagtttggagataatggtacacacgtctcgctgatggctgcggctattctggcagtgattgctgcctgtgtcagtggtttacgtatcactcagccacgatccagggcataaaaaaagcgcgtcgatcaggacgcgctttttagtatttacttcatattacttcaggtattcacccgtacgcagagcttcaattcgtttatccagcggcgggtgggtcatgaacaactcactgagcgatttcgacttaccgttaatgcagagagccatcatgctggttgcttcttgcggttcatagctggttttcaggcgctgcagcgcggcaatcattttctcgcgaccaaccagttttgccgaaccggcatcagcatggaattcacgatgacgcgagaaccacatggtgataatgctcgccagaataccaaacaccagttccagaaccgttgcaaccgcaaagtagatcagcgggttgccgttgctctcttcaccttcatcacgatttccgcccataaaacccgcggcaagctgcgccagaatacgggaaataaagataacgaaggtgttcaccacgccctgaatcagcgtcatggtgaccatatcaccattggcgatgtggctgatttcgtgagcaattaccgcctcggcttcatccgggctcatgttctgcagcaaaccggtgctgacagcaaccagagaggcatcacggcgcgcaccggttgcaaaagcgttgatgtccggcgcatggtagatagccacttgcggcatagcgatccccgcctgacgagcctgggttgctacagtattgaccagccaacgttccctttcgttacgcggttgctcgatcacttccccgccaacagatcgtaatgccatccatttggacatcagaagcgaaacgaaggaaccaccaaaaccgaacagcaaggccatgatcatcagcccctgaacgctgctcgactgtatccctgtcaggctcagtaccagcccgaaaacgaccattacggccaggttcgttagcaggaagagcgcgattcgcatcataattttctttttacctcagtttaacaaaacgcaatatgcgatacccacatcgtatgggttacgcgactattttcaagtctggatagtgcgtaagtcaccagaaagacacaactttacattttgtagcatctgatttacggcatcttgtcgctgttaaaaaatcaggcacaatttcttgtgcctgattgatattacttgacgggagcgggttgttccgcgggtctggctttttcaagcttcgccagatcgagtgcgatattcaccgtctcatccagataaggatccggctcctggtaatctttcggtagatcatccagtttcttcaactccggtttaccttcgcgtttaaagcgttcgttcaaacgcgccagacgcgtcgcatcatcttcattattctctttctcacgcacagcgtaattcagagaaacgatattgcgcttgtccttcatagcgttgaagcgcgcgatatccttcatgatgttctggaactcaggatctttcgcgatacgcgcattatgttccttcagcagctccggttcaaaggccgttaaatctcctgatttcacataagtcgcggcatcaatgctatcccacggcagcgcgttatcttcgaatttctcacccgtttccgtttcttcattacccgtcggcatgatgatgtctggcgttacgcctttacgttgcgtactgccgccgttaacgcgatagaatttctggatcgtgtactgcacagaacccagcgctggccattcaggacgtaacatctgatcgtaaatacggttcaatgaacggtattgctgaacggtgcctttaccaaacgtcggttcacccacaaccagcgcacgaccgtaatcctgcattgccgcggcaaagatttctgaagccgaagcactgaagcggtcaaccagcaccaccagcgggcctttatagaaaacctgtccgtcggtatcgctatcttcacgaaccttgccgttgttatcgcggacctgaacaatgggacccgcaggaataaacagaccggagagcgatacggcttcagttaacgccccaccgccattgctacgcaggtcgatgatgacgctgctgacattctgtttttccagtttctgcagttgcactttgacatcgtctgtcaaacccacatagaagcccggaatatccagcacgccgactttctctttaccgacggtcttcaccgacattttaaccgcgcggtcttcgagacgaatacgttcacgggtcaacgttacagtacgggtcttggtccctttaccagcaggtaaaatttccagacgaactttactgcccttcggccctttaattaaggcaaccacatcatcaagacgccagccaatcacgtcaaccatcggcttgcctgtttgaccaacaccgacaattttgtcaccaacgctgatagctttactcttcgctgccggaccacctgccaccatcgaattgataacggtgtagtcatcatccatttgcagcactgcgccaataccttccagcgacaaactcatttcagtgttgaactgttcggtattacgcggggaaagatagttggtatgcgggtcgatttcacgcgcaaacgccgtcattgccagcgagaaaacatcttcgctgttggtttgcgccagacgacgaatggcaaatttgtagcggcgagtcagggtttcacgaatttctttatccgtttttcctgtcagcttcaggcttaactcgtcgaatttgactttactgtcccacagcgcgttcaactcagcctcgtttttcggccagggcgctttgctgcggtcaaggttataagtgtcgttgccggtgaaatccatcggcttttccagtaccgacaaagcgtactggtaacgctcaaaacggcgcttttgcgccagattgtagagatcgtagaaaacgtcgagtttgcctgaacgcagttcatcgcctaactcggttttctttttcgcgaactgttcaacatcgcttgccagcagcacgttgtggctgtaatcgagcagattcaggtagcggtcaaagattttggccgaaaatgcctgatcgaggtcgaactggcgataatgagaacgggtgaagcgcgacgttacgcgctcacttaccgtcgcatgctgcgtctcttcctttaataccggaatttgatcagcacgcgtgatatcttctacagcgaaggtctggcctgctattgcaagcaggccagctaacgcggtaagcctaaaaaacatgttcatgcctggcccggcctccgtttcagaacaccaggtgttctgcgcgcacaatcaaagacatacccgaattcagctggacgcggacgccgtctttggtgatttctaatacggtggcatccatcgcgttttgacccgctttcaccttcagggcttgtccgacagtcagagctgaaatgtcagaaaccggggtgtgctgttcttcgcgaggtgcttttactgtttttggcgctttctctaccggcttttgcgcacgaggtttacgttcagcgccttctttgcggcgtggcgtagtcggacgtggcttgcgttcgcggcgcggtgcgtcttctttctcaccagcagttgcggcagcttcgcgttttttcgcttgctgttcagcacgctgtgcctgaacacgcgctttcgcttcttcaagctgcttgcgagcatgctctacatgttgctcgtccagctcaccgcatgggttgccgtcaagatcgacacgcgttgcgccgggtttaacaccgtaaagataacgccagctcgaagtgtagagacgtaaagcggatcgcaattgcgttttgctcaggttcatttccccagcaacacgatcgaccaaatcctgaaaaataccgattttcagcggacgcgcttcaccttccgcactgaaacagtggggaaaacgttcggccagaaacgcgattacttctttactgctattcaacttaggttgattttccatgaaatttcctgattacaacggacgtagccaacaagcgcaggcatgaacaggcgtcattataatgacgctatcagtaaatgctacgttatccgttgattatcctgcgacgctcgcaaagaattttttgtaatccgtcgttgcaagcactttttcaagctgtgccacaagctgacgtaagccttgctcgtcctcgtctgtaaagcgaccgaagacggtactatcgatgtcgagaacaccaataatctgatttttcaccaccagcggcagaacaatttcagaattactcgccgcatcacaggcaatatgcccgtcaaacacatgaacatcctcgatacgctgcacttgattgcgggcaaccgcagtgccgcacacgccgcgcccgacgggtatccggacacaggcaattttgccctgaaatggtccgagtaccagtgtatcgtcctcaagcaaataaaaacctgcccagtttatgtcagtgagacgctcatataacaacgcactggtgttcgcaagcgttgccagaaaactggtttctcccgccatcagcgcgttaaagtcgcgatttaaatccgcgtaaaattctgttttgttcattatataatcacttggttgtcttacctggatctgccagcctattaaaataagcattaaatgcgttaatgctcaagatcattcccatcatgggttaagattaatgttaattcttattacatttggcacgtcatggctcttaacacaccacaaattacgccgacaaaaaagataacagtgagggcaatcggcgaggaactgccgcgtggtgattaccaacgttgcccgcaatgtgacatgctgtttagcctgcccgagataaattctcatcaaagtgcctattgtccgcgctgtcaggcaaaaattcgtgacgggcgcgactggtcgctaacgcgcctggcggcaatggccttcaccatgctgttgcttatgccgtttgcctggggcgaaccgctgttgcatatctggctgttaggcattcgtattgacgccaacgttatgcaaggcatctggcaaatgaccaaacagggcgatgcgataacggggtcgatggtctttttctgcgttattggtgccccgctcattctggtgacctccatagcttatttatggtttggtaaccgactgggaatgaatttacgtccggtactgctgatgcttgagcgacttaaagagtgggtaatgctcgatatctacctggtcggcattggcgttgcttctataaaggtacaggattatgcccatatccaggctggtgtcggcttgttctcttttgtggcgttggtgattttaacgacggtgacgttgtcacatcttaatgtcgaagaactgtgggagcgattttatccgcagcgccccgctacgcgtagggacgagaaacttcgtgtctgtcttgggtgccattttaccggctatccagatcagcgtggtcgctgcccgcgttgccatatcccgctacgcctgcgtcgccgtcatagtctgcaaaaatgctgggcggcgctgttagcgtcaatcgttttattgttacctgccaacctgttgcctatttctatcatttatctgaacggaggacggcaggaagatacaattctttccggaattatgtcgctggcaagtagcaacattgcggttgcaggaatcgtgtttatcgccagtattctggtaccgtttactaaagtgatcgtcatgttcactttactgttgagcattcattttaaatgccagcaaggtttacgcacacgcattctgttactgcggatggtgacctggattggtcgctggtcgatgctcgacctgtttgtcatatctttaaccatgtcgctgattaatcgcgatcagatcctcgcttttactatgggaccggctgcgttttatttcggcgcagcggtaattttgactattcttgctgtggaatggctggacagccgcttactttgggatgcacatgagtcaggaaacgcccgcttcgacgactgaagcgcagattaaaaataaacgccgtatctcacctttctggctgctgccgttcatcgcgctaatgattgccagttggctgatttgggacagttatcaggaccggggtaataccgtcaccatcgactttatgtcggcggatggtattgttccaggccgtacgcctgttcgttatcagggcgttgaagtcggaacagtgcaggatatcagcctcagcgacgatcttcgtaagattgaagtcaaggtcagcatcaagtccgatatgaaagatgcgctgcgcgaagagactcagttctggctggtgacgccaaaagcatcgttggcaggtgtctccgggctggacgccctcgtcggtgggaactatatcggcatgatgccgggtaaaggtaaagagcaggatcactttgtcgcactcgatacccaaccgaaatatcggctggacaatggcgatctgatgatccacctgcaagcccccgatctcggttcgctgaacagcggttcattggtctatttccgcaagatcccggtgggaaaagtctacgactatgccatcaatcccaacaagcaaggcgtggtgattgatgtcctgatcgagcggcgttttaccgatctggtgaaaaaaggtagccgtttctggaacgtttccggcgttgatgccaacgtcagtatcagtggcgcgaaggtgaaactggaaagcctggcggcactggttaacggtgcgattgccttcgattcaccagaagagtcgaaacctgccgaggcggaagatacctttggtctgtatgaagatctggcccacagccagcgtggcgtaataataaaactggaactgccgagtggggccggattaaccgccgactcgacgccgttaatgtatcaggggctggaagtcggacagctgactaaactggatttaaatcctggtggtaaagtcacaggggaaatgaccgttgatcccagcgtcgttaccctgcttcgtgaaaatacccgcatcgaattacgcaacccgaaattatcccttagcgatgctaatctcagcgccctgctgaccggcaaaaccttcgagctggtgcccggcgatggcgagccacgcaaagagttcgttgttgtgccaggcgaaaaagcactgctgcatgaacctgatgttctgacgctgaccctgaccgcgccggaaagttacggtattgatgcgggtcagccgctcattcttcacggcgtgcaggtaggccaggttatcgatcgtaaactcaccagcaaaggcgtcacctttaccgtcgccatcgagcctcagcatcgcgaactggtaaaaggcgatagcaaatttgtcgtcaacagccgtgtcgatgtgaaggtggggctggatggcgttgagtttctcggtgccagcgcctcagaatggatcaatggcgggatacgtattctgccgggcgataaaggtgagatgaaagccagctatccactgtatgccaatttggaaaaagcgctggagaacagccttagcgatttacccaccacaaccgtgagtttgagtgcagagacgctgccggatgtgcaggcaggatcggtagtgctgtaccgtaaatttgaagttggtgaagtgattaccgtgcgtccgcgagctaacgcgtttgatatcgatctgcatattaagccggagtatcgcaaccttctgaccagcaatagcgtgttctgggcagaaggcggggcgaaagttcagctgaatggtagtggtctgaccgtacaggcatccccgctctccagagcattaaagggagccattagcttcgacaacctcagcggtgccagcgccagtcagcgtaaaggcgataagcgtattctgtatgcttccgaaacagcggcccgtgcggttggcgggcagattacgcttcacgctttcgatgccggaaaactggcggtcgggatgccaattcgctatctcggtattgatatcgggcaaatccagacgctggatctgattaccgcacgcaatgaagtacaggcaaaggcggtactttacccggaatatgtccagacctttgctcgcggtggtacgcgcttctcagtggtcacaccgcaaatttcggcagctggcgttgagcatcttgatactatcctccagccgtatatcaacgtcgaaccaggccggggcaatcctcgccgcgactttgaattacaagaggccaccattactgattcgcgttacctggatggcttaagcattattgttgaagcgccggaagccggttcgttaggcatcggtacgcctgtgctgttccgtggtctggaagtcggtacggttacaggaatgacgctggggacattgtcagatcgcgtgatgattgcgatgcgcatcagtaaacgctatcaacacctggtgcgtaacaattccgtcttctggttggcatcgggttacagtctggactttggtctgacgggcggcgtagtgaaaaccggcacctttaaccagtttatccgtggcggcatcgccttcgccacgcctccgggtacgccactggcaccgaaagcccaggaaggcaaacacttcctgttgcaggaaagtgaaccgaaagagtggcgtgaatggggaactgcgcttcccaaataatgcccactgctccggcgtgcctgcgccggagcgtttatgctaaactgcgcgcctgtttttttgccagtggtacatgctcgtggcccaacacaccgtttatttcccggacgcctttctgacacaaatgcgcgaagcgatgccttcgacgctctcatttgatgattttcttgccgcctgtcagcgcccgttgcgccgcagcattcgcgttaatacgctgaaaatctccgttgctgatttcctgcaattaaccgctccttatggctggacgcttacgccaattccgtggtgtgaagaaggtttctggattgaacgcgacaatgaagatgcattgccattgggtagtaccgccgagcatttaagtggcctgttttatattcaggaagccagttcaatgttgcctgttgccgccttgtttgctgacggtaatgcaccacagcgggtgatggatgtcgctgccgcgcctggctccaaaacgacgcaaatttccgcgcggatgaataacgaaggggcaatccttgccaatgagttttccgccagtcgggtaaaagtgttacatgccaatatcagccgctgtggtatcagtaatgttgcgctcacacattttgatggccgcgtgtttggtgcggcagtgccagaaatgttcgatgccattttgctggacgctccctgctctggcgaaggcgtggtgcgtaaagatcccgatgcgctaaaaaactggtcaccagaaagcaatcaggaaatcgcagctacacaacgggagcttatcgacagcgcctttcatgcattacgtcctggtggtacgctggtttactcgacctgtaccttaaaccaggaagaaaacgaagccgtttgcctgtggctgaaagagacttaccccgacgcagtagagtttttaccacttggcgatctcttccctggtgcaaacaaagcgctgaccgaagaaggctttttgcatgttttcccacaaatttacgactgcgaaggcttcttcgttgctcgtctgcgtaaaactcaggcgattcccgccttacccgcccccaaatacaaagtcggtaattttccgttcagcccggtgaaagatcgcgaagctggacaaattcgtcaggcggctacaggtgttggcttaaactgggatgaaaacctgcgcctctggcagcgtgacaaagaactgtggttgttcccggtgggcattgaagccctgatcggtaaagtccgattttctcggttggggattaaacttgccgagacgcacaacaaaggttatcgctggcagcatgaagcggttattgctcttgcctcacccgataatatgaatgcattcgagctgacaccgcaggaagcggaggagtggtatcgcgggcgcgatgtttacccgcaagccgcgccagtggcggatgatgtattggttactttccagcatcaaccgattggtttagccaaacggattggttcgcgattgaaaaacagctatccgcgtgaactggtgcgcgatgggaaactttttaccggtaacgcctgacagcgcacaaaaaaagcgcactttttgactggcacattcggctgcctcaactaggctgaaaaatggtgcgatcggactggtcgtaccacaatcggcagctaaatggagagcacgaagatgaaaaccagtgtgcgcataggcgcttttgaaatcgacgacggcgaattacacggtgaatcgccaggtgatcgaacgttaaccattccttgtaaatctgaccccgatttatgtatgcaactggatgcctgggatgctgaaaccagtatccctgccctgctaaatggcgaacactctgtcctttaccgtacccgttacgatcaacaatctgatgcctggattatgcgtcttgcctgatccaaaaagaacccgtcggcatggcgggttatttgtcctggttattcccccgttgtaaaatctctcctaaacttaacggtacggcaccacacttcggggatgaaatgttcgcgctggtactttttgtttgctacctggatggcggttgtgaagatattgttgtggatgtctacaacacggaacagcagtgtctttattctatgagcgatcaacggatccgccagggcggttgttttccgattgaggattttatagatggtttctggcgacctgcacaggagtacggtgatttttaattattgcaattgcacaagagtcagttcgcccccaaagacagcaccggtatcaatataatgcaggttgccaatatccacgcgatgtcgcaacggtgtatgaccaaaccagaaatgatcagcacctgtaattccctgccctttttggcgttcacctaatcgcgagcggctccacaagacctgatgcaaatcaacgtccttttgccattcataaacatcatctggataatcggcatgagcaataacatgcttgccggtgcgactgtgtacttcaagaataaagggcaaatgctgacatttttccagcgccgttttcgcttgtttctgttgattatctgccagcgcaataaaccagtcgccgccattcatcaaccacaaagacatctgctgggatgccagcgcatccatcgccatctgttcatgattgcctcttaccgcacaaacccaatgttgttccagtaactgcagacaacgtaaactttgcggcccacgatcgataacgtctcccactgagataagtaaatctcgccacggatcaaaacgacaatgccataatttgcggcgcaactgctcaagacaaccgtgtatatcgccagaaagccagatatgtcgccattgatgacccgcaattctctgataaacgggcgcaggctgtttcatcaatattttcctcccgcgctaaagatcacataatcttaacaagaatgttaaaaaacgctggactcagacagtagagtgtgtgttatggttgactataaagtcagcgaaggaaatgcttctggcttttaacagataaaaagagaccgaacacgattcctgtattcggtccagggaaatggctcttgggagagagccgtgcgctaaaagttggcattaatgcaggcttagttgccttgccctttaagaatagatgacgacgccaggttttccagtttgcgtgcaaaatggtcaataaaaagcgtggtggtcatcagctgaaatgttaaaaaccgcccgttctggtgaaagaactgaggcggtttttttattggaaatcaaaaggctattttaggtaattaacagagtttttcagctcgttctataaacggtgccagactcattttttcgccgggattgttaggatcatcaatctgaatcaccgaaatgggttgggcattggtcttcccactggcaacttccttttgtgcgatatcgtttaaaggatactgcacgagggtactcggattaataacatacaaagcattacccggtcggcaagtcagcatcacctcttcgcgattaaacgcccatttgtctttacccacttcaaaacgactgacggtaatcacctgcggtgcagccagcgccgctgcagaactggtgagtaacagaaacgccagaatactttttttcatcattttcgtaatccatcaaaaaggttcgagagtcgcaagcaggctgatgatcaccagcactaccgcacctatcgcccattcgagtttagtcatccacacaaaccagggtgccgcacgatcttcatcctgcctcatgcgcggtacaagaacataacgattagccagcgcaatgaccaccataatcatcaccaggatggctttgagcaataagagttggccccagtaagtcgtaagcgtggggggaaatccggtaatcaacaatgcattaagcacgccgcttgccagtacgccgatcaccgcaaaatgcccgcaccaggaaaaacgcatcagcgcctgaatagcctggtgtcgccaacggcctttgatgagttgcatacaccagagcaccggcagtaatcccccaaaccacgccgccgcacaaatcaggtgaatcgcgtgattagtctgatggattttcgctgttaccccttcattcagcgtcgcatgccccactcccgccagcagaataaattgcgcggtagtgagcataaacagcaaacgtggcatattccgcggttgcataagggcgacgatcaacgttacgagggcgagaacaatttgccataaccagatgccaccaaactgcgtttgcaaaacagcctgccaaatgtttggcgaaaatacatctgtccatcccgttcccatcaacccgccctgaacggcgagcattgcagtggcactgatcaaactccagacggcagcgtgctgttgtaaacgcagaaaacgcttcgccagcaagcgacgaatcgtcaagggggccagccaggcaccgtacattgcgaagccaaaaaccagcatcagcgaggtgaaatggataaatcgcagcgcgatccaggtaaacgccagcatgatttatttcacgctaaaggtgtagtgtcctttcgttttatgcccgtccaccgaaacaacatgccagtcaacggtgtaggttccgggtttcagcgaatcggccagtggaacaatcagttgcttttggtcctgctcatttcgcttcgccggtaatgttttaatattttcgttttttggccccgtgatttttgcaccactgaatcctgtttcaacaccttccgagaagtttaaagtgattgcctgcggtgcagctgtcacttgcgcgtttgccgcaggatactgatgcgttaaatgcgcatgtgcccagacggaaggtgtcaccaacgaagtggtcaggattgccagcgcgtagcgaagggagcgtgcagttgaagccatattatctattcctttttgtaataacttttttacagagcataaccttgtctaatgtctgagtcgaggatcatcaattccggcttgccatcctggctcactcttagtaacttttgcccgcgaatgatgaggagattaagaatgctgaagaatctggctaaactggatcaaacagaaatggataaagtgaatgtcgatttggcggcggccggggtggcatttaaagaacgctacaatatgccggtgatcgctgaagcggttgaacgtgaacagcctgaacatttgcgcagctggtttcgcgagcggcttattgcccaccgtttggcttcggtcaatctgtcacgtttaccttacgagcccaaacttaaataaaacttatacagagttacactttcttacataacgcctgctaaattatgagtattttctaaaccgcactcataatttgcagtcattttgaaaaggaagtcattatgtcgttctggaaagttgcagcagcgcaatatgagcctcgtaaaacctcactcaccgaacaggtagctcatcatctggagtttgtgagggccgccgccaggcaacaatgtcagctgttagtttttccatcgctttctttactggggtgtgattattcgcgacgtgcccttcctgccccacccgatctctcactgttagacccgctttgttatgccgcaacgacctggcgaatgaccatcattgccggccttcccgttgaatataacgatcgctttattcgtggaattgcggtgttcgcaccgtggcgaaaaacgcctgggatctaccatcagagtcatggtgcatgtctgggccgtcgttccagaaccatcacggtggtcgatgaacaaccgcaaggtatggatatggacccgacctgttcactgtttactacagggcaatgtctgggagaacccgacctgctggcgtcggcccgtcgcttacaatttttttcacatcagtactcgattgccgtgctgatggcaaatgcccgtggtaacagtgcactatgggatgaatatggtcgtctcatcgttcgcgccgatcgtggttcattattgttagtcggtcagcgttcatcacagggttggcaaggcgatatcattccattacgctaggctttttcggcctggagcatgccatgttgcgcattatcgatacagaaacctgcggtttgcagggagggatcgttgagattgcctctgttgatgtcattgacggaaaaatcgtcaaccccatgagccacctggtgcgccccgatcgtcctattagtccacaagcgatggcgattcatcgcatcaccgaagccatggtcgccgataaaccgtggattgaagatgtgatcccacactattacggtagtgaatggtatgtcgcgcataacgccagctttgaccgccgcgtactgcctgagatgcccggtgagtggatttgcactatgaaactggcccgtcgtttgtggcctgggatcaagtacagcaatatggcgttatataaaacacgcaagctcaatgtacagacgccgccgggcctgcatcatcaccgcgcgttgtatgactgttatatcaccgccgcgttgcttatcgatattatgaacacctccggctggacggcagaacagatggccgatatcaccggacgtccgtcgttgatgacgaccttcacctttggcaaataccgtggcaaagcggtttccgacgttgccgaacgcgatccgggctatctgcgctggttatttaataacctggacagcatgagcccggagctgcgtttaacactgaaacattatctggaaaatacttagtccgcaggcgtagcgggtaatgttccctgcgccagcgcgaccagaaaagcatattccatcgctacgccttcgtacgatttaaagcgaccagatttaccgccatggcctgagtccatgtcggtacagagcaataaaagatggtcatcggttttcagctcgcgcaatttagcgacccattttgccggttcccaatattgcacctgagaatcgtgcaaaccggtcgttaccagtaaatgcggataagcctgtgcggtgacgttgtcatacgggctgtagcttttcatgtactcgtaatattgcggatcctgcgggttaccccactcttcaaactcaccagtggtaagaggaattgattcatcaagcatcgttgttacaacatcaacaaacggtacctgggcgataacgccgtggaataattccgggcgttgattaattgcaacgcccatcaacatgccccccgcactcccgcccatcgcataacaaagcgaaggagagccatagcccagttttaacaatgcatcgcaggcatcaagataatcattaaacgtatttttcttcttcagaaattttccgtcttcgtaccattgttgccccagctcaccaccgccgcgaacatggacaatggcgtagacaaagccacgatctaacaaactcaagcggctaaaactgaaatcggcatcaatacttgcgccgtaagaaccatagccatacaccagcaacgggttgtgtcctttgcgaaaatgtttgcgatggtagaccaacgaaaccggaacttcgacgccatcacgggcgactatccacaggtgttcactgcggtaattcgccgcataaaaaccaggaacttccgtttgttttaatacacgacgctcaccggtatccatatccagttcaaacaaagtgtctggtgtagtcatggaagaataaccataacgcaatcgcgcggtttcaggttctggattgtaggcaatccaggtcacataggccggatcatcaaaggcaataccaatgacttcccgggtcttgcggttaatttggcgcaaactggttaacccgcgctgacgctcttcaaccaccagccagtcggtaaacagcgtaaacccttccagcatgatgttttcgcgtggcggaattaactcttcccactgttgctcatcacgcatacgggtacggtataagccaaagtttttgccgtggcggttggaacgcagataaaaacgatgctggtagtgatcaaggctgtattcgtgatctttgcggcgcggcagaaaaacaaacggctcggcatcggccatttccgcgtccagcaggcgaacttcactggtggtggcgctggccaaatgaatgactacatagtgcttcgaggtcgttttatgcaggctgacgtaataggtatcgtctttttcttcgtagatcagtttatcttgcgatgctggcgtaccgatggcgtgacgccagacctgataaggcagcagcgtcaccggatgcttgcgaacatagtagaaaatccaggagtcatttgcccagacaaagctgggttcaacgttatccagcagttccgggtaccagttaccagtttccagattacgaaaacgaatgccgtactggcgtcgggaaagaaaatcttctgccagcgccataatggtgttatcgggcgtaatcgccattccgcccatcgaataaaactcactatgagctgcgcgcttattggcatcgagcaatgtttcccactcatcccactcttcactgaatgccgattgacgctggtagatagcatattcacagcctggttcataaatatgccgatagcggtagccatttttgatgtagggcgcagaaacttctcgttgcggaatgcggtcgatgatttcctttaagatgcgatcctgcaaggcttgttgtgaggccatcacccgatgaccgtaactattttcttgttgcaggtagtccaggacttctggctgagaacgcgtatcgtcccgcagccagtagtaattatcgatgcgcgtatcgccatgaagcgtcatggcgtggggaatgcgggcggcttttggtagcatgttattgttctttctggttgaaacatcttataagggtggcaaaactcaccggggatgcaagcgaaacaggggagtcattgcttagatgatgacaggtaatggcgcggatatcgaatgttatgcagacagagaaaatcagcctgttcaaatggctgtgcgattctggatagcccgaaatagtcaacttcaggctatccagagagcggaattattccgccaaagtgcgtttttgctgttcgagatcgcgttcaatgccgtcacgaacatcctgggggattttcagcgcgtcacccagtgcattcaggtaactgcgttccataaaatggtcaatatcaatagccgcgcaactcaggaaatagatttccagcgcctcttcttcattgcggaccccggtagccaggcgttgtggatccagcggttgttcgattgcctgctcaatgagtacacgcccctgctcttccacgccggctccacgcaattgctggtcgattgccgcacgttctttggcatcaatatgaccatcacttttagcggcaaagaccagcgcaaggatcaaacgtgctgtacgctcatccagcggcgtactttgcgcgccaaactgcggttcgtcctgatgcgccgcgcgaattttatctttgtatttattccacagcaccgtacccgctaccgctccgccgccaaccagtaacgcgttggtgccatatttcgtaagaagtttacgtgctgatttatttgcgaccagcagcccagccagtccgcctaatgcgcctggcactaacagtttgaccaatccctgatccgcagacgaggaggtagaagaactgctttgcccaagcagggattgcagttgatttaaccagttagccatatttgctcctcaataaccatttttagtgcctgtagcatagcggatgaggatgtcagaaaatgtatatcgagacaaaagatgcgcaaataagcggggcggtaggccgttattcaaagaaattcgcgccaggtaaggtatttactgtatatcaggtgataagggtattttaggtgaaagtagtttgtcgttttgagtggcattgtttgatgctgattgcccgatgcgacgctgttgcgtcttctcaggcctacgattgtggtgcgttctggggcggacaaggcactcgcgccgcatccgccaacagtcaatcgaattatcagaagccattaacgccgctgatattccgccattcccgctttgcagtccacgctgacctggtaatgaatatcggcacttttaccacgcacggttagcggtactgaccatttatcatctttaccctgaatgtcctgcaaactgacccaagccacgggatcggcctgaccgacaattttttgatcatctgcccaacgcgccacgcgattttgttgataatcacgttttacgctcgcggcaattccggcagcatccagatcttcacactttgggaaagtgaccgacttgctggtttcattattggcagcgaaaactgatgcgcaggcagaaaccaacaacagccctaaaaacgcccctctttttttcatgtttttctccatagcacaatgattcaggagaaagcatggtacaaattgtcaggagcgcaagttgcttcaggccgcgtgtgaggcatcttcctcttcggattcagcaccgacgacctgtggggacggtaatttgccggttttcagaatggtgctcagcacatctttttgttctgccagccatagcgaaagggcttcacgttgctcgtcttccatttgcactggagaatttgtcagccaggtgtcaagcagatccgccgtatcaagcattttgtcataagcatcggcttcctttttgctggtaaacgacattttctcttcgccctcacgaatgactacgtatttaacttcaaccgccatttgcagcctctcataataactgtgattttatacagtatatttcttttcggttgagaaatcaacatcagcaataaagacacacgcaaacgttttcgtttatactgcgcgcggaattaatcaggggatattcgttatgacgttattaggcactgcgctgcgtccggcagcaactcgcgtgatgttattaggctccggtgaactgggtaaagaagtggcaatcgagtgtcagcgtctcggcgtagaggtgattgccgtcgatcgctatgccgacgcaccagccatgcatgtcgcgcatcgctcccatgtcattaatatgcttgatggtgatgcattacgccgtgtggttgaactggaaaaaccacattatatcgtgccggagatcgaagctattgccaccgatatgctgatccaacttgaagaggaaggactgaatgttgtcccctgcgctcgcgcaacgaaattaacgatgaatcgcgagggtatccgtcgcctggcggcagaagagctgcagctgcccacttccacttatcgttttgccgatagcgaaagccttttccgcgaggcggttgctgacattggctatccctgcattgtaaaaccggtgatgagctcttccggcaaggggcagacgtttattcgttctgcagagcaacttgctcaggcatggaagtacgctcagcaaggcggtcgcgccggagcgggccgcgtaattgttgaaggcgtcgttaagtttgacttcgaaattaccctgctaaccgtcagcgcggtggatggcgtccatttctgtgcaccagtaggtcatcgccaggaagatggcgactaccgtgaatcctggcaaccacagcaaatgagcccgcttgcccttgaacgtgcgcaggagattgcccgtaaagtggtgctggcactgggcggttatgggttgtttggtgtcgagctatttgtctgtggtgatgaggtgattttcagtgaggtctcccctcgtccacatgataccgggatggtgacgttaatttctcaagatctctcagagtttgccctgcatgtacgtgccttcctcggacttccggttggcgggatccgtcagtatggtcctgcagcttctgccgttattctgccacaactgaccagtcagaatgtcacgtttgataatgtgcagaatgccgtaggcgcagatttgcagattcgtttatttggtaagccggaaattgatggcagccgtcgtctgggggtggcactggctactgcagagagtgttgttgacgccattgaacgcgcgaagcacgccgccggacaggtaaaagtacagggttaaacccggcaaaaaaacgctacaaaaatgcccgatcctcgatcgggcattttgacttttacagcttagcgccttctacagcttcacgcgccagcttagtaatgcggtcgtaatcgcccgcttccagcgcatctgccggaaccagccaggaaccaccgatgcacagcacgcttttcagcgccaggtagtcacggtagttagccggagaaataccacccgtcgggcagaaacggacctgggagaacggacccgcgatcgcctgcagggctttcacgccgccgttagcttcagccgggaagaatttgaactctttcaaaccgtagtccatacccagcatcagttcggaaacagtgctgatccccggaatcagaggaatagtcccttcggtagcagctttcagcagcggctcggtcagacccgggctaattgcgaactgtgcacccgcttcagtgacttctgccagctgctgtggattcagcaccgtaccggcacccacaatcgcttcaggcacttctttggcgatagcacggatagcgtcaactgcacactcggtacgcagagtcacttccagaacgcgcaccccaccagcaaccaacgcttttgccatcggcaccgcgtgttccagtttttttaccacgataaccggtacaaccgggccggtggtcaggattgattctgcacttgttttccagtttttcatcagagttttctctcgcctgattacaaatttgtcgtcttaaaaagtgatacaggttgcgccctgttcggcaccggacagtttttcacgcaaggcgctgaataattcacgtcctgttcccacgcgtgacgcgctcaggtcaggaatgtgcggttcgcgagcagccagttccgcttcgtctaccagcagcgtcagttcgcctgtctgtccattcacacgaatgatgtccccgtcgcgcacttttgccagcagcccgccatcgtaggcttctggtgttacgtggatagctgacggcactttacctgaagcgccggagagtcgtccatcggtaactaacgcaattttgaaacaccggtccaataatacaccaagtggcggcatgagtttatgtaattctggcattccgttcgcttttggcccctgatgacggacaacaacgacacaatcgcggtccagcaaacccgcttcaaaggccggcataacgtcatgctggctttcaaaaacaaccgctggcgcttcaatcacctggttctcaaccggcacggcagaggttttcataaccgcacggcccaggttaccgcttaacacttttgtcccaccatgatgagagaaaggttgttcgaaggaagcgatcacattgctgtcgagtgatttttccgccccttcccgccagtccagttcaccattattcagccatggttcaagggtataacgagacagaccaaaacctgccaccgtattgacatcttcatgcagcaggcctgctttgagcagttcacgcaccagaaccggtacgccacctgccgcctggaagtggttaatatcggccggaccgttcgggtagagacgtgccatcagcggtacaacatcagaaaggtcagagaagtcatcccagttaatctgaataccggccgcgcgcgccatcgccaccaggtgcatggtgtggttagtggaaccaccggtcgccagcagtgcaacgataccgttcaccaccactttctcatcgatcatcttaccgatcggcatccattcattaccattaccggtcatgcgtgtaacctgacgcgcagctgcggcggtcaaagcatcgcgcagcggagaatccggatgaacaaaagaagagcctggcaactgcatccccataaactccaccaccatctggttggtgttggcagtaccgtagaaagtacatgttcccggcgcatggtaagacgcggcttctgactccagtaaggccatgcggtccactttaccttcggcataaagctggcgaatacgcactttttctttatttggcaaaccgcttgccatcggtccagacggcacaaacaccgcaggcaaatgaccaaacgacagggctgccatcgtcagacccgggacaatcttgtcgcacacaccgaggaacagagcaccatcaaacatgttatgggacagccccaccgccgcagacatcgctatcacttcgcggcttagcagcgacaattccattccatcctgcccctgggtgacaccatcacacatcgccggaacaccgcccgcaacctgaccaaccgcattcgcttcatgcagggctttacgaatgatttctggatagtgttcataaggctggtgcgcggagagcatgtcgttataggaggtgatgatggcgatattgttacgcaacatgcttttcaaagaggctttgtcttctggctggcaggcagcgaaaccgtgtgccaggttaccgcatgccaactgcgaacgatgaacggtcgaagttttcgcttgttctatccgggcgagataagcagagcgagtctcgcgcgaacgttcaatgattcgatttgttacgcgtaacaattgtggattcataaaggctcctgaaattgagttgtcagagcaggatgattcacaacgcgtttcattcagaggatttatgactgaaacgcctgtaaccggagctcatagggcaaaaacgtttcagtcagtgtaataaaaaaagcctcgtgggtgaatccgcacgaggcctgaaagtgtaaaaattgttctacaatctgcgcaagatcatgttaccggtaaaataaccataaaggataagcgcagatattactcaaactcattccaggaacgaccatcacgggtaatcatcgccaccgaggcaacgggtccccaggttccggcctgatacggtttcggcgcatcattgtccatcgcccacgcctcagtaatggagtctacccatttccaggcttcttccacttcgtcgcgacgtacaaacagtgcctgaataccacgcatggtttccagcagcaaacgttcataggcatccgccagatgcgtctgattaaaggtttctgaatagctcagatccagcttggtgatttgcaggttatgtttgtggtcaaggccaggaactttattcagtacctggatatccacgccttcatcaggttgcagacggatagtcagtttattctgcggcagatcctgccacgattctttaaacagattcagttcaggtgttttgaaatagaccacgacttcagaacatttggtcggcagacgtttaccagtacgcaggtagaatggcacaccggcccagcgccagttatcaatgtcgacgcggatcgccacgaaagtttctgtattgctgctcttgttcgcgccctcttcttccagatatcccggcacttttttgccctgggcgaagcccgcagtatattgcccgcgtacggttttttcgcgtacgttggagcggtcgatgcggcgcagagacttcagtactttcactttttcatcgcggatgctgtctgcgctcaggtcagacggcggagacatcgcaatcatgcaaagaatttgcagcaggtggttctggatcatgtcgcgcatctgaccggctttatcaaaatagccccagcgcccttcgatccccacttcttctgccacggtaatctcaacatgatcaatggtgcgattgtcccagttattcacaaacagggagttagcaaaacgcagcgccaacaggttcagcaccgtttctttaccaagatagtggtcgatacggtaaacctggcactcctcgaagtattcgccaacctgatcattgatttcctgcgaggtcgccagcgacgtccccagcggtttctccatgactacgcgtgccggtttagcattcagttttgcctcgccaagccctttgcaaattgcgccaaaagtgctgggcggcatggcaaagtagttaatggtgatacgatttttttgatccagcatcgcgccgagacggctgaatgcagcagtgtcattgacatcgagattacaaaaatccagacgtgcactcagggtgtcccataaaccttcatcaatggtttctttcatgaaagtttcgagcgcctcgcggacaactttggtatatgccgctttatcccagtcagcacgccctacgccgataatccgggtgtccgggttgagctgaccggctttttccagttgatacagggaaggcagcaatttacgacgcgcaaggtcgcctttcgcgccgaaaatgaccaggtcacaggcctgggctgtttgcgttaccgccatgtcattctccttaagttaactaacccggtacttaagccagggtatacttgtaattttcttacggtgcactgtactgcttttacgagcttgcgaaaactgtaaacgcttatccacccgtgcgattacgggaaaagcgcgcaaagtgcggcaaaactgataaaaaaatcatcgttttccattgggtaaaaatctgacactgatcatgttatgaaaaaaaataacaacttttttatctgcttttgtcattaacacggcacacaggcgtaatatctgacaaaactgcatttcgatttctttcagtgcggaaatcgtcattacccgtgagtctctttacatcatgaatatgctggaaaaaatccagtctcagctggaacatttgagcaaatcagagcgcaaagttgccgaggtcattctggcttcgcccgataacgcgatccattcgagtattgctgctatggcactggaagccaatgttagcgaaccgacggtgaatcgtttctgtcgcagcatggacacgcgcggttttcctgattttaaacttcatctggcacagagtctggcgaatggcactccctatgttaatcgcaatgtcaatgaagatgacagcgttgaatcatacacagggaaaatatttgagtccgcaatggcaacgcttgatcatgtccgtcattcactggataaatctgccatcaaccgcgccgtcgacttgctcactcaggcaaaaaaaatcgcctttttcggattaggctcttcagccgccgttgcccacgatgcgatgaataagttctttcgttttaatgttccggtggtgtactccgatgatatcgtgctgcaacgcatgagttgtatgaattgtagcgacggagacgtggtggtgctgatttctcacactggaagaacaaaaaatctggtcgagctggcgcagctggcacgcgaaaacgacgccatggtgattgccctcacctctgcgggtaccccgctcgcccgggaagcaacgctggcaattaccctcgacgtaccggaagatactgacatttatatgcccatggtttctcgacttgcacagctgaccgtgatagatgtgctggcgacaggatttactttgcgacgcggtgcaaaattcagagataacttgaagcgggtcaaagaagcgctgaaggaatcgcgttttgataagcagttacttaatttaagtgacgatcgctaaaaacgactgtcactgtcctaatcttatacgacatccgaatgagattaatttatcgccatcgcggcgttatttcattcggatttcatgttcaagcaacacctggttgtttcagtcaacggagtattacatgtccagaaggcttcgcagaacaaaaatcgttaccacgttaggcccagcaacagatcgcgataataatcttgaaaaagttatcgcggcgggtgccaacgttgtacgtatgaacttttctcacggctcgcctgaagatcacaaaatgcgcgcggataaagttcgtgagattgccgcaaaactggggcgtcatgtggctattctgggtgacctccaggggcccaaaatccgtgtatccacctttaaagaaggcaaagttttcctcaatattggggataaattcctgctcgacgccaacctgggtaaaggtgaaggcgacaaagaaaaagtcggtatcgactacaaaggcctgcctgctgacgtcgtgcctggtgacatcctgctgctggacgatggtcgcgtccagttaaaagtactggaagttcagggcatgaaagtgttcaccgaagtcaccgtcggtggtcccctctccaacaataaaggtatcaacaaacttggcggcggtttgtcggctgaagcgctgaccgaaaaagacaaagcagacattaagactgcggcgttgattggcgtagattacctggctgtctccttcccacgctgtggcgaagatctgaactatgcccgtcgcctggcacgcgatgcaggatgtgatgcgaaaattgttgccaaggttgaacgtgcggaagccgtttgcagccaggatgcaatggatgacatcatcctcgcctctgacgtggtaatggttgcacgtggcgacctcggtgtggaaattggcgacccggaactggtcggcattcagaaagcgttgatccgtcgtgcgcgtcagctaaaccgagcggtaatcacggcgacccagatgatggagtcaatgattactaacccgatgccgacgcgtgcagaagtcatggacgtagcaaacgccgttctggatggtactgacgctgtgatgctgtctgcagaaactgccgctgggcagtatccgtcagaaaccgttgcagccatggcgcgcgtttgcctgggtgcggaaaaaatcccgagcatcaacgtttctaaacaccgtctggacgttcagttcgacaatgtggaagaagctattgccatgtcagcaatgtacgcagctaaccacctgaaaggcgttacggcgatcatcaccatgaccgaatcgggtcgtaccgcgctgatgacctcccgtatcagctctggtctgccaattttcgccatgtcgcgccatgaacgtacgctgaacctgactgctctctatcgtggcgttacgccggtgcactttgatagcgctaatgacggcgtagcagctgccagcgaagcggttaatctgctgcgcgataaaggttacttgatgtctggtgacctggtgattgtcacccagggcgacgtgatgagtaccgtgggttctactaataccacgcgtattttaacggtagagtaagtacgttgccggatgcggcgaaaacgccacatccggcctacagttcaatgatagttcaacagatttcgaatattctgaagcaaacttgaacttatcatcaggcgaaggcctctcctcgcgagaggcttttttatttgatgggataaagatctttgcgcttatacggctggatttcgcccggtttgcgagttttcagcaattttagtatccaggtgtattgttctggtcgcggaccaacaaaaatctcgacttcttcattcatccgccgcgcaatcgtatgatcatccgcctctaacagatcatccatcggtgggcgcacctgaatcgtcagacgatgcgtcttgccatcataaatcggaaacagcggtacaacgcgcgcacggcacactttcatcaaacgaccaatcgcgggcaacgtcgctttataggtggcaaagaaatccacaaattcgctgtgctctgggccatgatcctgatcgggtaaataatatccccagtacccctgacgtaccgactggatgaatggtttaataccgtcatttctcgcatgcagacgaccgccaaagcgacgacgcaccgtgttccagacataatcaaaaaccgggttgccctgattatggaacatcgctgccattttctgcccttgcgaggccatcagcatggcaggaatatcgacggcccaaccgtgcggcaccagaaagataactttctcgttattacgccgcatctcttcgatgatctccagcccttgccagtcaacgcgcggctgaattttctccggcccgcgtattgccaactcagccatcattgccatcgcttgcggcgcggtggcaaacatctcatcaacaatcgcttcgcgttcagcttcactacgttctggaaagcagagcgacagattgattaacgcacgacggcgtgagctttttcccagtcgtccggcaaaacgtcccagccgtgccagaatgggatcacggaactttggcggcgttaaagcgatacccgccatcgctgctacgcccagccatgctccccagtagcgcgggtggcgaaaggatttatcaaactcaggaatgtattcgctattattttttttcgtttccatgcttttccagtttcggataaggcaaaaatcaatctggtgatagtgtagcggcgcaacttgccccgcaccaaataaaaaaagccggtactgactgcgtaccggctgcgaatggatgttaattaatcaaaccgtagctgcggcacaatctctttggcctgcgccaggaattcgcgacgatcggagccggtcagcccttcggtacgcggcagttttgccgtcagcgggtttacggcctgctggtttatccatacttcatagtgcagatgcggcccggttgaacgtccggtattaccggaaagcgcgatacggtcgccacgtttcaccttctgtcccggtttcaccagaatcttgcgcaagtgcatataacgcgtggtgtagctgcgaccatgacgaatagccacataataacctgctgcgccactgcgtttggcaaccaccacttcaccgtcacccactgaaagcactggcgtaccctgcggcatggcgaaatcaacacctctgtgtggtgcaacgcgaccggtcaccggattagtacgacgcgggttaaaattagacgagatacggaactgtttcgccgtcgggaatcgcaagaatcctttcgccagaccagtaccgttacgatcgtagaatttgccatcttcagcgcggatagcgtaataatctttaccttctgaacgcaaacgtacgcccagcagctggctttgctcacgtttaccatcaagcatttctcgagacattaacaccgcaaattcatcgccttttttcagtttgcggaaatccatttgccactgcatggctttaatcactgcgctcacttcggcgctggttaaaccggcgtttctggcgctggcaacaaagcttcccccgacggtacctttcagcagattgttaacccactctccttgctgcatttcgctggtcattttaaaaccgttagcggcagtacggtcataggttcgggtttcacgacgagacacttcccaggtgaggcgctgcagttcgccgtccgcggttaatgtccaggagagttgttgaccgattttcaggttacgcaattctttgtcggccgcagccagttgggtgatatcacccatatcaataccatactgattgagaatgctgcttagcgtatcgccagtggaaacaacatattcatgcacgcccgcttcaccggcgattttgtcatccagttcgtcctggggaatggcttcatcttcttgtgcagcttgatcaatcggctcactggcttcaggtaagagcgaacgaatttcgttctgttccagctcaatggttttgacaattggcgtggcatcacggtgataaacataaggccgccagacagcgacggccagagtaagaacggtgagcgaccccaacataacgcggtgtggtcgcggtaaattattaaacgccagggcgacagagcgggctatctgttgcacgtaatcacttcctcattaatctcctttcaggcagctcgcatactggttggctaattgactcaggaattctgaatagcttgttttacccagtttgatattcgtccccaggggatccaacgttcccatacgaacggatgtccctcgtgcgacgctctcaacgaccgctggcctgaactgtggctcagcaaaaacgcaggttgctttttgctcaaccaactgtgttcttatttcatgtaaacgctgcgcgccaggttgaatctcagggttaacggtaaaatgaccaagcggtgtcagtccaaactgtttttcgaaatagccgtaagcatcgtgaaaaacgaaataacctttccccttgagcggcgcgagctcgttaccaacctgcgtttcggttgaggctaattgtgcctcaaaatccttcaggttggcgtcaagtttggctcgactttgcggcataagttccactaattttccatggattgcaaccgctgtagcccgcgctatctctggggaaagccaaagatgcatgttgaaatcgccgtgatggtgatcttcgtcacttttttccgcgtggtcgtgatcatcatcatcgccgtgaatacttttcatcagtagcggtttcacatcttcaagctgcgcaatcgttacctgcttcgctcctggtaatttgcttaccggtttttgcataaacgcttccatctccgggccaacccaaacgactaagtccgcgttctgtaagcgttttacatccgatgggcgcagtgaataatcatgttctgaagcgccgtcaggaagtaaaacctctgtttctgttaccccatcagcaatggcagaagcgatgaacccaacgggtttaagcgaagcgacaacggcggcatctgcggcctgtgttgcacctccccagagagcggcggataatgctgcgaaaagaagcgtttttttatgtaacataatgcgaccaataatcgtaatgaatatgagaagtgtgatattataacatttcatgactactgcaagactaaaattaacatgacaagtctggtttccctggaaaatgtctcggtttcttttggccaacgccgcgtcctctctgatgtgtcgctggaacttaaacctggaaaaattttgactttacttgggccaaatggcgcaggtaagtcgacactggtacgggtagtgctcgggctggtaacacccgatgaaggggttatcaagcgcaacggaaaactgcgcatcggctatgtaccgcagaagctgtatctcgacaccacgttgccactgaccgtaaaccgttttttacgcttacgccctggtacacataaagaagatattttgcctgcactgaaacgtgtccaggccgggcacctgattaacgcaccgatgcaaaagctctctggtggcgaaacgcagcgtgtactattagcgcgagcattgttaaatcgcccgcaattattagtgctggatgaacccactcaaggcgtggatgtaaatggccaggtggcgttatatgaccttattgaccaactgcgtcgtgaactggattgtggcgttttaatggtttctcacgatctgcatctggtgatggcaaaaaccgatgaagtgctgtgcctgaatcaccacatttgttgttccggcacaccggaagttgtttccctgcatccggagtttatttcaatgtttggtcctcgtggtgctgaacaactgggtatctatcgccatcatcataaccatcgtcacgatttacagggacgaattgttttgcgtcggggaaatgatcgctcatgattgaattattatttcccggttggttagccgggatcatgctcgcctgtgccgcgggtccgctgggttcgtttgtagtctggcgtcgtatgtcttatttcggtgatacgctggctcatgcctcattacttggcgtcgcgtttggtttgttgctggacgtgaatccattctatgcggtgattgccgttacgctgctgctggcgggcggtctggtatggctggagaagcgtccacagctggcgatcgacacgttattagggattatggcgcacagtgccctgtcgctgggcctggtggtcgtgagtctgatgtctaatattcgtgttgatttgatggcttacctgttcggtgatttgctggcagtgacgccagaagatctcatctctattgcgattggcgtggtcatcgtggtggctattttgttctggcaatggcgcaatttgctgtcaatgacgataagcccggatctggcgtttgttgatggtgtgaaattacagcgagtgaaattgttgttgatgctggtgacggcattgacgattggtgtagcgatgaaatttgtcggtgcgttgattattacttcgttgctgattattcctgctgctactgcgcgtcgctttgcccgcacgccggaacagatggctggtgtcgctgttttggtggggatggtggcagtgactggcggtttaaccttttccgcggtttacgatacgccggcgggtccgtcggtggtgctatgtgcggcactgttatttattctcagtatgatgaaaaagcaggccagctaatctatcgctgaacacatttgtcggatgcggcgcgagcgccttatccgacctacggttcggtatctctggtagtcctggtaagacgcgaacagcgtcgcatcaggcatattgccagtgccggatgcggcgcgagcgaccaatccgacttacggcatttctggcggcgttatgccaaagtgattccacgcccgcgtcgtcgccatacgcccacgcggtgtacgctgcaaaaagccttgctgaatcaaataaggttccagcacatcctcaatggtttcacgttcttcgccaatggctgccgccaggttatccagacctacaggtccaccaaagaacttatcgattaccgccagcaacaatttgcggtccatataatcgaaaccttcagcatcgacattcaacatatccagcgcctgagcagcgatatctgccgagatggtgccatcgtgcttcacttcggcgaaatcacgcactcgacgcagcagacggttggcaatgcgcggcgtaccgcgagcgcgacgagcaacttccagcgcgccgtcatcactcatctcaagccccataaagcgtgcgctgcgactgacgatatattgcagatccggcacctgataaaactccagacgttgcacaataccaaaacggtcgcgcaacggtgatgtcagcgaacctgcgcgcgtggttgcaccaatcagggtaaacggcggcaaatcaattttaatggagcgtgccgccggaccttcaccaatcatgatatccagttggtagtcttccattgccgggtacagcacttcttcaacaactggcgatagacggtggatctcatcaataaacagcacgtcatgcggttcaaggttagtgagcatcgcagccaaatcgcccgccttttccagcaccggaccagaagtcgtgcgtaaattaacgcccatttcattggcgacaatgttggcaagcgtagttttacccaaccccggaggaccaaaaatcaacaaatgatcgagggcatcgccgcgcagtttcgctgctttgatgaaaatctccatctgtgaacgaacctgcggctgaccaacatactcttccagtaatttggggcgaatggcgcgatctgctacatcttccggcaaagtggtaccggcagaaatcagacggtctgcttcaatcatcctttacctcataacgcggcgcgtagggcttcgcgaattaaagtttcactgctggcgtcagggcgagcgattttgctcaccatgcggcttgcttcttgtggtttatagcccagcgccaccagcgcggcaaccgcttcttgttcagcatcgtcggtcgccgggctggcaggagacgtgagtaccaggtcggcggctggcgtaaagagatcgccatgcaaacctttaaatcggtctttcatttcaacaatcaagcgttcggcggtttttttgccaatacccggcagtttcaccagtgcccccacttcttcacgctcaacggcattaacgaactgctgcgctgacattccggagaggatcgccagcgccaacttcgggccgacgccgttggttttgatcaactctttgaacaatgtgcgctcttgtttattgttaaaaccgtacagcagttgcgcgtcttcacgcaccacaaagtgggtgaaaacgatcgcttcctgacccgcttcagggagttcataaaaacaggtcatcggcatatgcacttcatagcctacgccgcccacttcaattaacaccagcgggggttgtttttcaatgatgatgcctctgagtctgcctatcacatgacgctcctgcgtaatgaatcaaagataatgctgtatgataaaaaaatgctggatagatatccagcgaaggatgaagaaaacttgcgaggtgtctcgatgaactgaaaaatggcacagtataatttattctacaggttatattggaagcaaatattttaatattacatattcagtgaagaaatgcgtaataaaaatatacattgcgcctcctgaaaaaataaattttttatgctattacgtatatttgtatctatttcaatggaatgacaacgtgaatattaattaccctgctgaatatgaaattggagatatcgtctttacatgtataggtgctgccttatttggtcaaatatcagctgcatcaaattgctggagtaatcacgtcgggatcattatcggtcataacggtgaagacttcctggttgcagaaagccgggttcccctttcaaccatcaccacgctatctcgttttattaaacgttcgtctaatcaacgctatgctataaagcgattagacgctgggctgacagaacgacaaaaacaacgaattgttgaacaggttccctcccggctacgcaaactttaccacaccggttttaaatacgaatcttcgcgccagttctgttcaaaatttgtttttgatatttataaagaagcgctatgtattccggtgggtgaaatagagacgtttggagaattgttaaatagcaatccgaatgcaaaactcactttctggaaattctggttcctgggttctattccgtgggagcgtaaaaccgtcacgccagccagtttgtggcatcatccgggtttggtgttgattcatgcggagggagtggaaacgcctcagccggaactgaccgaggcggtataacttaacgcagtcgccctctcgccaggttcagccgcgattcgctcatctgcatcgcattctgactaacgtggcagtgggtgatagcaatcgccagcgcatcggcggcatccgcctgtggattagcgggcagtttcagcaaggtgcggaccatatgctgcacctggcttttttcggcactgccaatacctaccaccgtttgctttacctgacgtgccgcgtattcaaatactggcaactcctgattcaccgccgccacaatcgccacgccgcgcgcctggcccagtttcagggctgagtcagcgttctttgccataaagacttgttcaatggcgaaataatcaggctggaactgggtgatgatttccgtcacgcccgcatagatgagtttcagacgagacggtaaatcatccactttggtgcggatgcatccgctacccaggtaggacagttgcctacctacctggcggatgacgccgtagccggtcacgcgcgaacccggatcaatgccgagaataatagccatcacgcgtctccgttttgctgtttagcaggcctcatcagagagtcgctgcgacctcatcagagatttcaccgttatggtaaacttcctgcacgtcgtcgcaatcttccagcatatcgatcagacgcatcagtttcggtgcggtttctgcatccatatcagctttggtagacgggatcatggaaacttccgcgctgtctgctttcagacctgccgcttccagagcgtcgcgcactttacccatttcttcccatgcagtgtagacatcaatcgcgccgtcatcataggtcacaacgtcttcagcacctgcttccagtgctgcttccatgatggtgtcttcatcgcctttctcgaaggagatcacgccttttttgctgaacagataggcaacggaaccatcagtaccgaggttaccgccacatttgctaaatgcatgacgcacttcagcaacggtacggttgcggttgtcagacagacattcaatcatgattgccgtgccgccaggaccgtaaccttcgtagatgatggtttccatgtttgcatcatcatcaccgcccacaccacgtgcaattgcgcggttcagtgtgtcacgggtcatgttgttagacagtgctttatccaccgccgcacgcagacgcgggttagcgtccggatcgccaccgcccagcttagccgcggttaccagctcacgaatgattttagtgaagattttaccgcgcttagcatcctgcgcagctttacgatgtctggtgttggcccatttactatgacctgccataaaaatatctccagatagccctgcctgttcaggcagcgttaattacaaactgttcaatcgcctgccggttgctccaggacttagtgagcgccgccgcagcaggcgcatcaagccacttgtaagccagatgttcagtgaaaacgatctgccgctcgtgcggaagcgcaagacagaaccatgattccgtattacgcgtcacgcccggcgcatagcgatgacgtaaatgtgaaaaaatttcaaactctaccgtgcgctgacagtcaattaaggtcagttgttcagcgacaacatcaatggtgacctcttcctttacttcgcgcatggcagcttgcggcgcggtttcaccctcttccacgctgccggttaccgactgccagaaatcgggatcgtcacgccgctgcaacatcagcacccgtttcgtatcttgtgcgtagatgaccactaagatcgaaacgggacgcttatacactttatccttcacgctgcctcttcgttgactgccttcgctcatcccattcacatagttatctatgctcatgggagttcactcagttgccgcctcgatgcaacgcgaatgatttcgtgtatttgagtcatatcagttattctcagccttcttcacaacctgaatgctcagctcagccagtgcagtcgggttagcaaagctcggtgcttcagtcatcagacacgctgccgccgtggttttcgggaaggcgataacgtcacggatattgtcggtgccggtcagcagcatggtcagacggtcaagaccgaatgccagacctgcgtgcggcggagtaccgtatttcagagcgtcgagcaggaagccgaatttctcgcgctgttcctcttcgttgatacccagaataccaaacaccgtctgctgcatatcaccattatggatacgtactgaaccaccgcccacttcgtaaccattgatgaccatatcgtaagcgttcgccaccgcattttccggtgcagctttcagttctgcagccgtcatatctttcggtgaggtgaacggatggtgcattgccgtcaggccgccttcaccgtcgtcttcaaacatcgggaagtcgataacccacagcggtgcccatttgctttcgtcggtcagaccaaggtctttacccactttcaggcgcagtgcacccatcgcgtcggcaacaattttcttgttgtcggcaccgaagaaaatcatatcgccatcttgcgcggcagtacgatccaggatgtcttcgatgatttctgcattaaggaacttcgctaccgggctgttgataccttccagacctttcgcgcgttcgttaactttgatgtaagccagacctttcgcgccgtagattttaacgaagttaccgtattcgtcgatctgcttacgggtcagcgatgcgccgcccggaacgcgcagagccgctacgcgacctttcggatcgttcgccggacctgcaaatacagcaaactcaacagatttcagcagatcagcaacgtcagtcagttccatcgggttacgcagatccggtttatcagaaccataacggcgttctgcttccgcaaaggtcattaccgggaaatcgcccagatccacacccttcacttccagccacagatgacgcaccagcgcttccatcacttcacgcacttgcggcgcggtcatgaaagaagtttccacatcgatctgagtaaattcaggctgacggtcagcacgcaggtcttcgtcacggaagcatttaacgatctgatagtaacggtcaaaaccggacatcatcagcagctgtttgaacaactgcggggattgcggcagtgcgtagaatttacctttgtgcacacgagaaggcaccaggtagtcacgcgcgccttccggcgtggctttggtcagcatcggagtttcgatgtcgaggaagccgtggtcatccataaaacggcgcaccaggctggtgattttagcgcgggttttcaggcgctgagccatttccggacgacgcaggtcgaggtagcggtatttcagacgcgcttcttcggtgttgacgtggttagagtcaagcggcagaacatctgcgcggttgatgatagtcagcgaggacgccagcacttcgatttcgccggtcgccatatcgcggttaatatttttttcgtcacgcgcacgtacggtgcccgtgacctgaatgcagaactcattacgcagttcagaggccagctttaacgcgtccgcacgatccggatcgaaaaatacctgcacgataccttcgcggtcgcgcatatcgatgaagatcaggctaccaagatcacgacgacggttgacccaaccacacagagtcacctgctgccccacgtgggacaaacggagctgtccacaatattctgtacgcatgagatatcccttaacttagctgccggcggatgccccctgctgcgcaggtgaccaagtcgcagcgttagctgtatgtcacaactgaatgaaaaaaggcggctattatactggaaattctgccgcaccgtaagagcctggcccgcgctggaacgcctcgttaccactttatatcgggcctgaaatcagactctacgccagtttgctataaaggtgttgcccgaactcataaaaattaacaaaatttgtcgttccgccatcggctaatcgcattaaggtgtgaggcacgattttgttttttcaggagtcattatgcttgaacttaatgctaaaaccactgcgctggtggtgatcgatttacaagaaggcatcttaccttttgccggtggtccacatactgccgatgaggtagttaatcgcgccgggaagctggcggcgaaatttcgcgccagcggtcagcccgtgtttctggtgcgcgttggctggtctgccgattacgctgaagcattaaaacagccggtcgatgcgccctcaccggctaaagtgttgcccgaaaattggtggcaacatcctgctgcattaggtgcaaccgacagcgatatcgaaatcatcaaacgtcaatggggtgcgttttacggtacggatctggagttgcaattacgccgccgaggtatcgatacaatagtgttatgtgggatctcgaccaatatcggtgttgaatccaccgcccgcaatgcctgggaacttggctttaatctggtgattgccgaagacgcctgtagtgccgccagcgccgagcagcacaataacagtatcaaccatatctacccgcgcatcgcccgtgtgcgtagcgtggaagagatcctcaacgcgttatgatttacatcggtctaccgcaatggtcgcatcctaaatgggtgcggttggggatcaccagccttgaagagtatgcccgccactttaactgcgtggagggcaacaccacgctttacgccctgccgaaacccgaggttgtcctgcgctggcgtgagcagaccacagatgacttccgcttctgttttaagtttccggcgaccatttcgcatcaggcagcattacggcattgcgatgatttagtgactgaatttttgacccgcatgtcaccgttggctccgcgcattgggcaatactggctgcaactgcctgccacattcggcccacgggagctgcctgcgctttggcattttctcgattctcttcctggcgaatttaattatggcgtggaagtccgccatccacagtttttcgccaaaggagaagaggaacaaacgcttaatcgcggtttacatcagcgcggcgttaatcgggtgattttagacagccgcccggttcatgcagcacgtccacacagtgaagctattcgcgacgctcaacgaaaaaaacctaaagttccggtacatgctgtactgacggcgacaaatccgctgatccgttttatcggtagtgatgatatgacgcaaaaccgggaattatttcaggtctggttacaaaaattagcgcagtggcatcagaccactacgccttatctttttttacatacgccagacattgcccaggcaccggaactggtacataccctgtgggaagacttacgtaaaacgcttccagagatcggagcagttccggctattccacagcaatcttctcttttctgaatttgccacctatcatagacaggtgccatcggccattttaaagggagtttgtatggtaagcgcgctgtacgccgttttaagtgcgttgttattaatgaagttctcttttgatgtcgttcgcctgcgaatgcagtaccgcgttgcctatggcgacggcggttttagcgaactgcaaagcgctattcgcattcatggtaacgcggtggaatatattcccatcgcgattgtgctgatgctgtttatggaaatgaatggcgcagaaacctggatggtgcatatttgcggcatcgttttgcttgctggtcgtctgatgcattattacggttttcatcaccgtctgttccgctggcgacgttccggcatgagcgccacctggtgtgcgctgttgctgatggtgctggcgaatctttggtatatgccctgggagttggttttctccctgcgttagcgcacaatacgccactttctttttcccggatttttacgttatgtctcaccgcgacacgctattttctgcccctatcgccagactgggcgactggacctttgatgaacgggtagctgaagtcttcccggatatgatccagcgttccgtacccggctattccaatattatttccatgattggtatgttagccgagcgcttcgttcaacctggtacgcaggtttacgatctgggttgttctctgggcgcggcgacgctctcggtgcgtcgcaacattcatcatgataattgcaaaattattgccatcgacaactccccggcgatgattgaacgctgccgtcgtcatattgacgcctataaagcccctacgccagtagacgtcattgaaggtgatattcgcgatatcgccattgaaaacgcatcgatggtggtgctgaattttaccctgcaattcctggaaccttccgagcgccaggcgttactggataaaatttatcaagggctgaaccccggcggcgcgctggtgctttcggaaaaattcagtttcgaagatgccaaagttggtgaactgttgttcaacatgcaccacgactttaaacgtgccaacggttacagcgaactggagatcagccagaagcgcagcatgctggaaaacgtgatgctgaccgattccgtggaaacccataaagcacgcctgcataacgccggttttgagcatagtgagctgtggttccagtgctttaactttggttcactggtggcattaaaagcagaggacgctgcatgatcgactttggtaacttttattctctgattgccaaaaatcatctttcacactggctcgaaacgctgcccgcgcagattgctaactggcagcgcgagcagcagcacgggttgtttaagcagtggtcaaatgcggtggagtttctacctgaaattaaaccgtatcgtcttgatttattgcatagcgttacggcagaaagcgaagagccactgagcgcagggcaaattaaacgcattgaaacgctgatgcgcaacctgatgccgtggcgcaaagggccgttctcactgtatggcgtcaacatcgataccgaatggcgttccgactggaaatgggatcgtgttctgccccatctttctgatttaaccggacgcaccattctggatgtcggctgcggcagcggttatcacatgtggcgcatgattggcgcaggcgcgcacctcgcggtggggatcgaccctacgcaactgtttctgtgccagtttgaagcggtgcgtaaactactgggtaatgatcagcgcgcgcatttgttaccgttaggtattgaacaacttccggcactgaaagcctttgataccgtcttttcgatgggcgtgctttaccatcgccgttcaccgctggagcatctatggcagttgaaagatcaactggtcaatgaaggtgaactggtgctggaaacgctggttattgatggtgatgagaacacggtgctggtaccaggcgatcgttacgcgcaaatgcgtaatgtctatttcatcccttccgcgctggcgctgaaaaactggctgaagaagtgtggttttgtagatatccgcattgcggatgtgagcgttaccaccacagaagagcagcgacgcaccgaatggatggttaccgaatcgctggccgatttcctcgacccacatgatccgggtaaaacggtggaaggttatccggcacctaaacgcgcggtgctgattgcgcgcaagccgtaaaggtctggtattactgccggatgcggcgtgaacgccttatccggcctacaaaaccttgctaattcaatatattgcagggactatgtaggcctgataagcatagcgcatcaggcagctttacgtttgcataacctcagcgcccgtttccgggcgctattcacgtcttacgcctgaacagctggctgatcaaacgccgttaacttcggtgcattgcccgtatatttttcgatatacaccaacgctgagttaccggcacaggcatttgccagctgcgagctggggatatccgccgttaacacgttcgcactgccgtttttacacaagccattttccagatctggccatgcaccttcatgcacgcataccacgccttttttgatcccgtcagtcaccaccgcgcctgtcaaaatctgaccacgtttgttccagacacgcaccagatcgccattcgcaataccaaagcgtgcagcatcttcggtgtgaatagtgattggttcacgatcggcgatcgcatattttttacgcagttccgcatagttaagctgactgtgtaaacggtgtgccggatgtgcggtcagaagctgtaactgcttctcgtcggcggtacctttccattcatcaggagccagccaggttgggtgtgccgggcaatccttatagccaaatttttccaacgtttttgaatagatttcaattttgccgcttggcgtacccagcgcatttttcaccggatcggcgcggaaatcaccataacgaacgtactgttcgttcttctcgctgtggcgcatttcgatcagtttattttgctgccagaaggcattaaacattggcatagtgacgcgttgcgcacgggcacctttctgagcggcatcatagaaaaatttcagccacgccatttcatctttaccttcggtatagatctcttttccgccaggtttgagtaattccgcaagatcggcaaacacgtcaaaatcgttacgcgcttcaaattgcggagcaacagcctgcttcatcggcacaatatgctggttgctgtaatcaccggtcatcgtcaagtcattgcgctcaaacgatgtggtgatcggtaatacgatatctgcgtgtttggctgctgcggtccagtagcattcagaaacgacgatcatctccggtttctgccatgctttaatcagacgattagtatcctggtgatgggtaaagttaccgccacccgcccaccagatcattttgatattcggatacgtttgttctttaccgttatgctgatatttgccgccaggattttccagcgcatcgacgatacgggcaacaggaatcgccgtcattccgccatcatcagcggcctcgctggcatgtccggcaatcgccgcagacatttccggcagcacgccgccaacacgcgtcgggttgccaccgttggagtaatgataagagaaaccaaaaccgccgcccggtgtaccaatctgccctaacatcgccgccagcgtcaccagcatccagtgtttctgttcaccatattgctggcgctgaattccccagcctgccatcagcattgtgcgattcgccgccatcagttcagcgagtttgactatctgcgcttccggtacgccagtaatttccgccgcccagaccgcgctcttcggcgtattatcgctcttacctgtcagatactcttcaaactgcggatacccggtagtgtatttttcaaggaacactttatcgtgtttgccttgtgtcatcagggtatgcgcaatccctaacatcagtgccacgtcggtgcccatattcggcgcgatccaggtggcattatcgtcaaagaattcgatggtttcggagcggataggatcaatggcaatcactggtttgccagattttttcagctgatggaagtattccagcccttgctcatcggtactgctccaggcaatttttaaggtattcagcgggttcattccccacagcaccacaacctggctgttttccagaatcagcggccaggaggtctgctgttcatacacctctacagaaccgaccacatgcggcatgatcacctgtgctgccccggttgaataatcgccgctatgcccggaataaccgcccgccaggttcatataacgttgcagtaaggtttgcgctttatgcaacacgccagaagagcgccagccgtaagatccggcaaaaatggccgatggtccgttagctttacgaatacgatcatgttgctcatgaatcagttttaatgcctgttcccagctcacctgtacataggtatcttcgccacgacctttcgccggttgcagtggattatcgagatagctttttctcaccatcggatgctgaatacgcgccgtggtgtgtacctgatccgccgccgtagactgtaaggaattcggtatggttttcgccagcgcgcctgttgaagaaacaatcttgccgtccttcacttctacgttcatcgctccccaacgtcccgcggtgaggattttaccgcccttctcttctgcccatgcggggagcggtgctgccgatgtcaccaccagcgctccagcggcaataccgctgtgtttaataaattcacgtcttgttaatgtcataacttcctccctgatcaacgaggatcactgtttctcggtaatatctttggcgttgtactggaaataccgcgttaaaatgtccagttcgttttcgctcatgctggttcgtgcccccattcctttggcaatggacggccacgcattgacggtgtaatggtcggcggcaataggggcatgacaaccagcgcaataggtatcgtcaagtttttcagcgtattgccatagcggtttacggtccgctaatgcgggatcggtaagcgcaccctgtaaagacgcctgacgccattgattgccgtattcgtcagcctgccattccccgtttacagtgagcgccttgataccttcttcacttaatgtggctagcgccagccgttgacctgccgccaggtagagcgtgttttcactgccctgcatttgataaccctgcaacagaacgatcggctgtttgccactggcatcaacgacggtgagatcggttccaggattcacggtagccagctcgcctatgtgagaagttttgaaaggataaatatgtgcgccattagtaactgaagtagcggcctgactttccagctcatgcgccgcgttgtcatccatttttatttctggcggaaaatgggcaatgcctttatgacaatcgatacaggtttcgctgtccttttgtgctttgttatgcattttctgcgcagattcactttgcgaggcaatatccatggcatcaaaagaatggcaactacggcacgttgcagagtcagtggcttttaattctttccatactgtttcggccatttcctggcgatgagcttcgaacttatcgtcactgtctattttgccgctaacaaattcatgataaatatctttagatgcctttaatttagcaaataaataatccatccctgactttggaatatggcaatcggcacattccgcacgtatccctttctggttcgaaaagtggacagttccctgatattcctcaaaaggtttactcatcgagtggcaggaaaggcaaaatgctgtatccgacgttttatgtaagactttttgcgccagcaataacccgccgccaccaaccacaaccgctatcagcaaaaacaataacccaatgcgttttttccctcgcatagattcctctaattaaattactggacaccgaaatcattgtataattaaatatacaacgaattaaccgcttgcataattaggcacaacactgcctgaaacaatcgataaagaatatgatttattacaatgtaatcattaattgctaaggaataacccagttgctatttagaatatatatttatcagttttagtaatttaaatcccataattaatgtgaatatatacaatatttttagcacaacgctatgcgcactgtcacccgctcaacagatcacggttatcgttcgttttttatactgttcagggataaaaaaaggcccctgttgaaattgcaggggcctggtacgagcaagcatcatattgggcgacatgatgcaacggtaaaaatcatttggcctgatggcgttcaatgattcctttcatttcagcaaccgccgccccgtctacgatataacgcgaatactcgtccgcgtgttcatctgatgacatggacaatccttgattacgataacgcatcggtgaggcttgccacgctcccgcggagctatggacttccagcactccggcatcgaggaagtggtgcaggttttctgcacggactcctgctccggccataatgattggagcatcacgatgggcaataagttccataatttttgataaaccttgcagtgcgtctgatttttgccctgatgtcagtacccgggcaatgcccaattccgcaagattattgagtgtatataaagggttagcgcacatatcgaaggcgcgatgaaaagtcactgccagcggaccggcagcagccattattttttccattcgtggcatatcgacattcccgtcaacatcgagaacgcccgtcaccagtccaggaaaacctaattcgcggaccgtgcgcacatcctcaagaatggcggcaaactcaccgtcgctgtagcaaaaatcaccaccgcgtgggcgaattatcggatgcacagggatcgtcacccgctggcgcacggatttcagtacacccaacgacggcgttaagcccccctcttttggggctgcgcataattcaactctgtctgcgccgttttgctgcgccgttagtgcacattccatgctgtaacagcaaatttccagtaatgccatttttactccttaattacgccgactgctcgctggcaacgatctcttcaatggaccacggatgaaacttaatagttgttttgccatcggtgaccgccagcgtcggattcggtaatcgctcatgctcaccttttggcgaactggttttcactgagatccccggtaggctgagtccttcatcagaaagcaatgccagcgcacgggcattcagcgtttctggatcacccggcagaacgatttcaatatgttcccaaccttcgtgtgggtaacgtttttccccgggccacggtagctccacaatagaaaactgccagtgcgcaacctgtaccggttcatgcaatttaaacagacaaatcggtctgccattgatcatattttctgacaaaagctcgccacactgttcaaacccgcgacgccagcgttcagcagtggcgttttgatggcaacgcaaagaaatgtgatcggcagtcagcggagtgatattcaaccccagacggcgggaaagttcatctaatgcgtggataaatcgcggtaaatccgatgcaatatcctgcagctcgtcgatagattgccagttcgccataatcactcttcgtctttcagtaaaagcgttaatttaccctgttgccctgtgccaaccaaccgctgatttcacgccgcttctgatgcaatagtgaaaacggcaatacgccacgcgcacgttgctgacgaaaacagccatttgcagtatactcccgccctaatttctttaactggtgcgggcaatttttgctcgcttcatcaatgtaaggtattccggtgaatattcaggctcttctctcagaaaaagtccgtcaggccatgattgcggcaggcgcgcctgcggattgcgaaccgcaggttcgtcagtcagcaaaagttcagttcggcgactatcaggctaacggcatgatggcagttgctaaaaaactgggtatggcaccgcgacaattagcagagcaggtgctgactcatctggatcttaacggtatcgccagcaaagttgagatcgccggtccaggctttatcaacattttccttgatccggcattcctggctgaacatgttcagcaggcgctggcgtccgatcgtctcggtgttgctacgccagaaaaacagaccattgtggttgactactctgcgccaaacgtggcgaaagagatgcatgtcggtcacctgcgctctaccattattggtgacgcagcagtgcgtactctggagttcctcggtcacaaagtgattcgcgcaaaccacgtcggcgactggggcactcagttcggtatgctgattgcatggctggaaaagcagcagcaggaaaacgccggtgaaatggagctggctgaccttgaaggtttctaccgcgatgcgaaaaagcattacgatgaagatgaagagttcgccgagcgcgcacgtaactacgtggtaaaactgcaaagcggtgacgaatatttccgcgagatgtggcgcaaactggtcgacatcaccatgacgcagaaccagatcacctacgatcgtctcaacgtgacgctgacccgtgatgacgtgatgggcgaaagcctctacaacccgatgctgccaggaattgtggcggatctcaaagccaaaggtctggcagtagaaagcgaaggggcgaccgtcgtattccttgatgagtttaaaaacaaggaaggcgaaccgatgggcgtgatcattcagaagaaagatggcggctatctctacaccaccactgatatcgcctgtgcgaaatatcgttatgaaacactgcatgccgatcgcgtgctgtattacatcgactcccgtcagcatcaacacctgatgcaggcatgggcgatcgtccgtaaagcaggctatgtaccggaatccgtaccgctggaacaccacatgttcggcatgatgctgggtaaagacggcaaaccgttcaaaacccgcgcgggtggtacagtgaaactggccgatctgctggatgaagccctggaacgtgcacgccgtctggtggcagaaaagaacccggatatgccagccgacgagctggaaaaactggctaacgcggttggtattggtgcggtgaaatatgcggatctctccaaaaaccgcaccacggactacatcttcgactgggacaacatgctggcgtttgagggtaataccgcgccatacatgcagtatgcatacacgcgtgtattgtccgtgttccgtaaagcagaaattgacgaagagcaactggctgcagctccggttatcatccgtgaagatcgtgaagcgcaactggcagctcgcctgctgcagtttgaagaaaccctcaccgtggttgcccgtgaaggcacgccgcatgtaatgtgtgcttacctgtacgatctggccggtctgttctctggcttctacgagcactgcccgatcctcagcgcagaaaacgaagaagtgcgtaacagccgtctaaaactggcacaactgacggcgaagacgctgaagctgggtctggatacgctgggtattgagactgtagagcgtatgtaatcgatttttcgtgagagtgaagcctgatcagggttagccgatcaggcttttttattgccatctaaatgtattctgaaaatggacatgccattgttttctcactgttggataagaggccagaagcgtaatatccggccccagggaaacgataacggttgaatttaaggaataccgcagtgtttaaatttcttgtattaacattaggcattatctcttgccaggcttacgcagaagatacggttatagtaaacgaccatgacatttcagccatcaaagattgttggcaaaaaaattcagatgatgatactgacgttaacgtgatcaaatcatgcctgcgacaagaatacaatctcgtcgatgcgcaattaaataaagcctatggtgaagcttatcgttatatagaacaagtgccacgcacaggtgtaaaaaaacctgataccgaacaacttaacttgcttaaaaaatcacagcgagcctggctggattttagggacaaagaatgtgaattaatcctttcaaatgaggacgttcaggatttaagtgacccttattctgaatcagaatggctctcatgtatgatcatacagaccaatacgcgaactcgccagttgcagctataccgtaactctgaagatttttatccaagccctttgacaagaggataattcacatctttttggcatgttttgttgcaagctattcctgataaataattgcaacaagacatcgagcctttttcactgagttattaaacatactcgcgagcgcgtaatttttttgtccttcagcgataattcacaatcacttcattacgttgtacctttagcggtggaattaaccgcccaccgcctggcacttcccagataaatcgcaacggttctgctgccgctataccggaaaaggccacggtggttccgctctgcccctctaattcgacacaacgagattgcgaacacaagcgaacccgcagtcctgaaggtgtcgggccgataagctgataacgccacgctaccagcgtcatcaatcctgaagcaggttgtcgcgtagaaagaggcgcagacgacatcgactcaccgcgatgatttagcgtaattcctacactacttgcctgccacatcccctccccggcggcttgcaccagcagcggaaacaataatattgctaataaggttctcattatttgccgccaattgtcgccgtcatgcggatatgtcggttatcagacagttccagattcgacaggaccactaactgcggcaagctgcggcgcaggaagcgagacaataatggtcgcagcgcgtggttcaccaacaatactggcggcgcacccagcatctcctgacgggatagcgcttcctgagtttgcgccagtaaacgatccgccagccctggctccagtcctcccccgccctgcagcgcctgtagtaacaaacgttccagcggtgtatcgaggccaataacatggacttcatctttgccaggaaaccactgctgggtaatcgcccgtcccaacgccacgcgcacgacggcggttaattcatgtggatcgctttggatgggcgcatgttccgccagcgtttcgagaatggtgcgcatatcgcgaatcggtactttttcatcgaggagattttgcagcactttatgcagtgtggtgagcgtgacgacgccaggaacgagatcttccgtcagctttggcatctcctgggcgacgcgatccaacagctgttgcgcctcctgacgaccaaacagctctgcggcatgctggctaatgaggtggttaagatgcgttgctaccaccgtgctggcctcaaccactgtgtacccctgaatctgcgcctgttcttttagcgcactttcaatccagatagcattcaggccaaatgccggatcgacggtcgcctcaccaggtaacgtcccggcagcggttccagggttaatcgccagccagcgccccggataagcatcaccactgccaatctccacgcctttcatcaaaatgcgatagcgggcaggttgcagatccatattgtcgcgaatgtgcaccactggcggcagaaatcccatctcctgggcaaatttcttgcggatactgcgtatacggcccaacaactcaccatcctgctggaaatcgaccatcgggatcagtcgataacccacttccattcccagagaatcttccagttgtacatcgttccacgtcgcttcgacaacggtattattctctgccatttttaccggtttgggttcggcaggcgctttttgttcgcgtccgcgtatccaccaggccagcccgagcaatccggcagtgaacagcaaaaataccaggttcggcattccaggcaccaggccgagtaaaccgagcacggcggcgcttaacaacataacgcttgggttactgaaaagctgattcaccatctgctcgccaacatcctgatcggtgctgacacgcgtaacgatgacccccgcggcggtagaaatcaccagcgccggaatttgtgccaccagaccgtcgccaatggtcaatagcgtataactttccgccgcgtgtcccatgctcatgccatgttgcagcacgccgaccagcaacccgccgacaatgttaatgaccatgatgaggatcccggcgatggcatcgccgcgaacaaacttacttgccccgtccattgagccgtaaaaatcggcttcctgagtcacttcggagcggcgttttttcgcctcatcttcaccaatcaatccggcgttaaggtcggcgtcaatcgccatctgcttacccggcataccatcgagaacaaagcgcgcacccacttctgcgatacgcccggcacctttggtaatgaccataaagttgatgatcacgagaatgacaaacaccacgataccgatagcgaaattgccaccaacgaggaagtgaccgaacgcttcgaccaccttccctgccgccgccgcgccggtatgcccttccattaaaatgatacgggttgaagccacgttaagtgccagacgcaacagcgtggtaaacaacagaatggtcggaaacgcagcaaactcaagcgtgcgctgggtaaacatcgccaccagcaacaccatgatcgacaaggcaatattgaaggtaaacaacaggtcgagtatgaatgcgggcagtggcagcaccatcatcgacaagatcaacaggatcaaaatcggtccggcaaggatctgccattgtgtcgatttcaggtttgcgggcaggcgcagcatcgcggccagattactcatgggtcggtttctcgttaataaaatccagggcttccggcaccggaagatgagtaggttgtacagggcgctgtccaccagccagacgccagcgtttcagttgccagacccaggccagcacttccgccaccgcggcgtacagttgacccgggatttgttgaccaatctccgcatgtcgatacagcgctcgcgccagcggcggcgcttcaagcgtcgggacgttattttcagcgccaatttcacgaatgcgcagcgcgaccagccctgcacctttagcgaccactttcggtgcgctcattttgttttcgtcatactgcaacgctaccgaatagtgggtcgggttattgacaatgacatccgctttcggcacatcggccatcatccgacgccgtgcagcagctcgctgcatctgacggatccgccctttaacatgagggtcaccttcgctttgtttgaactcatcacgaatatcctgccgtgacatacgcagctttttcaggtggctgaatatttggaaaaagacgtcaaatcccaccattggaatgacaccaagcaccaccagcagtgcgcatagccctaccaaatccatcgcattacccatggcggtaatcggagactcggccatcaagcgcatcatctgcggccagtgatgccagagaaaaaaccccgtcacgctgccaaccaggatggttttcaaaattgctttaagcaactccgcgccagtctgagccgagaacatccgtttaatgcccggtagcgggttgagtttggaaaacttcggctgcaaggatttgccgctaaataccagccctcccagcatgaccggagaaatgagcgccaccagcaccacgccgctaatcagcggcagcagcgccagcatggcttctctgatcagcagaataatctgcccgaggatcagattcgggtcattgataatactgtgatcaaaatgcagcccagcggagagcatgcccgacaatcgacgggccagcgacacaccgccaaaccagataacactaacgcccaccagcaaaatcagcagtgaggtcagttcacgggaacgcgggatttgcccctcttcccgcgctttttctagtcggtgaggtgtgggggcttctgttttgtcgtcgctctcgtcagacacgtcgccaatcctggaaagagtattaagcgtgaatgatgccagagcgcaaagcgttcaatggtttgagtaaggggcaaaacaggcgggatttagggcttttgctgccacacatcaagcatagtgtgcgtttgtcggatgcggcgtcatcgccttatcagaccgcctgatatgacgtggtcacgccacatcaggcaatacaaatcaaaatccaagactatccaacaaatcgtccacctgatcctgactggctaccacaccggctttgctggtatcgacctgaggtccattaagcaaactctggttttcacgttttggacgcgactcctgttccgggatgttttccaacagcaccatcagcaactggcgttcgatctcctgaatgacatccatcatccgcttaatgacctgcccggtgagatcctgaaaatcctgcgccatcatgatttccagcagttgcgcgttagtaaagctggtatgcgcgggtacatctgccagaaattgtcgtgtatctgttaccagttcacgggcgtcggcaaggtcaatcggatcggcaaaccagtcatcccaacgttgggttaacgcttttgctgatttctccatttgatcctgatgcggttgtgacgcctcaacactgttcagcgcccgctccgcagcctgggcggtcatctgcacaacatagtacaaacgatcgcgcgcatcggggatggcttccgccgcttcggcaatggcctgatccagccccagttcccgcaaactgtcgcgcagcatacgcgtcaggctgccgatgcgcgcaatgatatcgccagctgaatgctcgtcagcaggtttgattgatggttgcatcatagtcgcatcctcacatgcccagtttctcaaagattttgttgagtttttcctccagcgtcgcggcggtaaatggcttcaccacatagccactggcccccgcttgcgccgcagcaatgatgttctctttcttcgcttctgcagtcaccattaacactggcaatgccgacatcgcgccatccgcacgaattgttttcagcaattccaggccatccatattgggcatgttccagtcggagataacaaatccataaccgcctgcctgcaacttattgagagcgtcgacgccatcttccgcttcctcaacattattgaatcccagctctttcagcaggttacgcactatgcgtcgcatggtggaaaagtcatccacaaccaaaaatttaagttctttatccgccatttcacactcctgatttaaatacgtatcgcctgtccggcactaatttttgccaacatttgctggcttacctggctaagatcgaccacttcgcagacaccacccatattgatggcctcgcgcggcatgccgaacaccacgcaacttgcttcgttttgcgcaagggtccatgcccccgcctgacgcatcgccaacattcccgccgcgccgtcgttgcccataccggtcaggatcaccccaaccgcattacgccccgcctgtttggcgacagaatggaacaacacatctaccgaaggccgatgacggttaaccgccgggccatcgtgaattttgatttggtaatttgcgccactacgcgacagctccatatgccgatcgcccggcgcaatataggcatgccccggcaagacacgttctccgtcttcggcttctttaaccccgatctggcaaagcttattaagtctgtcggcaaaagagcgggtgaaaccgggcggcatatgctgggtaattaacagtgccgggctggaaagcggcaacggttgcagtacgtgacgaattgcctcagttccacccgttgaagcaccaatcgcaatcagtttttcagaactcaacaacggccccgccttcagcgttgtcggtgccgacaatggcttatgtgctgcaaggctcgcctttgctgccgtacgcaccttttcagcaatcatttcgttatacgccagcataccttcgcgaatacccagttgcggtttggtgacaaaatctatcgcccccagctccagcgcgcgcagcgtgacttctgaccctttgccggtcagggaagaaaccatcacaacgggcattggacgcaaacgcattaatttttcgaggaaatccagtccgtccatccgcggcatttcaacatccagcgtcagcacatcgggattgaatttcttaatcaagtcacgcgcgaccagcggatcaggcgcggtcgccaccatttccatgtcgctatggctgttgatgatttctgtcatgatctggcgcatcagtgccgaatcatcgacagataacaccctgattttgctcatcgttaatccttacttagcgcatacaccgtctgaccacgcagcgtgaagcggcgctcaaggtggctaaagttttcagagtgacccgcaaacagcaatccgtcgggtttaaggagcggaacaaagcggcgcaaaatctcctgctgggtagtttgatcgaagtagatcatgacgttacgacagaagatcgcatcaaacggccccggcacggtgtactgtttcgccagtagattcagcggggcaaaatcaacatagttcgccagctcctgacgcacgcgtaccagcccttcatgcggccccgtccctcgcatgaaataccgttgcagttgctgcggcgtcaggtttttcaactcttcatggcgatagataccgcttctggctttttccagcacttcggtgtcgatatcactggcaaacactttccagcgtccgggcgcggtgcccaatgtgtcagccagcgtcatcgcaatgctgtacggctcttcgccggtcgaagccgccgcgctccatacgcgatactcgccagaacggcgacgtgcgtgatccgcgagcagagggaaatgatgtgcctcacggaaaaatgccgtcagattcgtggtcagcgaattgataaacgcctgccactcaccgctgtgctgattagattccagcaagttcagataatgaccgaaatccgtcagtcccagcgaacgcaaacgacgaaccagtcggttgtaaaccatgtcgcgtttatggtcagccagaacgatcccggctcgttgatagatcaattgacttatccgccgaaaatgcgcgtcggaaagcgccaggcgctcggtcatctgtaacaataaagacgtttgcccacagggcagagatgaagtcatagcgccttctcaatcacttcaggataccactggcgcaatttgtaactgcaccgactcatgtcgtgctacttcatgttcttcaagggtaaataccgccacacgcgacgaaagatggtcggcctgattcgccagttgttccgttgccaccgccgcttcttctaccagcgaggcgttctgctgagtcacctgatccatctggctgacagcctgtgcaacctgctcaatcccccgctgttgttcttccgacgcagaggcaatttctcccataatgtcgttcacgcgggtcaccgaactgacaatatcgatcatggtcgcggcggcgttattcaccagtttcgaaccctgctggacacgattgactgactcttcgatcagccctttgatctcttttgctgcctgcgcgctacggctggcaagattgcgcacttcacctgccactaccgcaaaaccacgcccctgctctccggcgcgagccgcttccactgccgcattcagggccagaatattggtctggaaagcaattccgtcgataacgctgataatgtcgccaattttttgcgagctggtggcgatctcctgcatggtgtgagtcatggtactgacctgaacaccgcccgcctgcgccgttgtcgcggcattttttgccagttccgacgcctgtcgtgcgttatcggcgttttgccctaccgtggcggttaattgctccatactggcggccgtttgtgccagcgatgccgcctgctgttcggtacgacttgagagatcgttattgcctgcgacaatctccgcgataccaatgtgcatctcctggcttcccttacgcacatcacttaccgtcccacgcaaagcctgctgcatggtcttcagactggcaaaaatggcggtgatctcattacgaccatataccgcaatcggacgcgccagattacccgcagcaatgctgtcaaaatggctaccgataatggccagtggttgaacaatcatcttgcgcgtccaccacagcgcactgctgatgtagatcgccgcaacaataatcatgctgataaacaccagtgccgaaatctgatagttacgctggctttgcgcactggcggcttccagcacatggttgatctccagctgccaggcctcaaagttaacgtcaaacgcattctgtgatccctgcaccggcgcagtgaggaaatccgaaagttgattactttcaagccaggtcgcctgatgttcgagatcgttgtgccagcgggcaaaacttttctccgtctctttttgcaatcccctgacgtgctcgttgcccgcagtcatcgccataaaacttttaaacagcgtggtggattgcgtcagactggcgcgcgccgtcgtcatcaacgttttaatgtcatccgccggatagctaagtgccgtcagagtgcccgctttgttcagcgcggtactggcctgtaacattaccgcccgagtttgcgctaatgccgcacgttgctgattgctctgctcgacctgattcagtcgttgcaaatcgtcgcgaaatgcccaaaaagacatgccgttactgccaatctgcaagatcccgcagagaatcaaaattaaaaacagcgtggtcgaaattcgaatacgattaaacatcaacgctccccatcaggcggcaatgaccgcgttagtaaatactcgtcaaaatgtttcccagtttggatcttgttcagcaattcgcagtcgtggctgagccggtggttgctcactggcaggacgggatggtgtttgcggtttattggtgagtgggctggctgccagacggaacgcggaaactgcttgcgttaaacgactcgcctgttcttccagcgcagcggcggcggcagctgattcctgcaccagcgatgcgttctgttgcgtgacgcgatccatttccgaaaccgccaatgcgacttgatcgatgccacggctctgttcatccgatgccgatgcaatctcgcccataatgtcagtcacgcgagtgacagcattgacgatattgttcattgtttccccggcgctttcgaccagcaccgaaccggtatcaacgcgtgagacggagtcttcaatgagggctttgatctcttttgccgcctgggcgctgcgactggcaagattacgcacttcacccgccaccacggcaaaaccacggccctgttcacccgcacgcgcggcttcaaccgcggcattcagcgcgaggatattagtctggaaggcaataccgtcgataacgctgataatgtcggcaattttcttcgaactatcggcgatctcatgcatcgttttcactacgccatccaccactttgccgccgtgctgggcggtgtcggaggcactttgcgccagttgcgaggcctggcgggcgttatcggcgttttgcttcactgtcgcggtgagctgctccatgctggcggcagtttcttccagcgcggatgcctgctgttcagtacgggaggaaagatcggtgttgcccgccgcaatttcacgggtaccggcatagatggcatctgaaccttcgcggacatgagtgacggtgtcagtcaaagagcgttgcatatgtgaaacgctctgcgccaggtcgcccatttcactgcgcccgtcaatggtcagggtattcgccaggttaccaccggcgatttcgcgaatgtgagcaataatttttgccagcggagtaagcaacatacggcgaatgccgtaccacgccaccagcagaatcaataccaccaccagcgcgataaccgccagttgccactgggcaaatcggtaatcatctgcgttgtcagtgacgatatcgcgatacagtttttcactgctgagggcgtactgagcaaacgcttcgcccattgcattttgcattccctgggttggctgagcgaaataagctccagtattgccataatctagataatcaatcagttcagttaacgctgtgtaatagtttttatatttttcatcaatattacgactggtagcgaccatttcaggtaacggtgccatgcttttgaattttttataatgcgtcgctgcctgcgccaatgttttcctggcgctatcgagcaattcaactttggcgttactttgttgattggaggaatccatcatcatccgtaccgctgaacgactcaggttaatgcgcgtttgcagcattaaatcccaggttgacgtcagctcgccctgctgttcccgtaattgattggaaaccacaaagctcttctggctatggtgaagggaagaaaaaaacagactgccggaaataagctgtaacagtgcgaatacccccagcaccattaccaacagcgtgactacgcggatacggttaatcataaggcaccttcctgaaaacaagttgatctcgttatcggcaaggaggggggaaactttattgctgatgccacccgccgcgaaattgaaataaaaaacccgatgcgcagatcatcgggttcatttcaattgaggaaatcgggagaattacgccacttctgacgccgcgctatctaacagcgccatctcttcgctgttcagcagtttttcgatgttcaccagaatcaacatccggtcgcccagtgcgcccagtccagtgagatattctgttgaaagcgtcacggcaaattccggtgccggacgaatttgctccgccgtcaatgaaagcacgtctgagacgccgtcaaccacgatgccgaccacccgctgtccgagattcaggacgataactaccgtgttgtcgttatagtccacatccacctggctgaacttaattcgtaagtcaacaatcggcacaataacgccgcgcagattcgtgacgcctttgataaacgctggcgtgttcgcaatccgtgttacctgatcgtagccacggatctcctgcactttcaggatatcaataccgtactcttcatcaccaagggtaaataccagaaattcctggcctgacggctcgctggccagctttgttacattcgtcataccggtcatattgttacctttttactcattcaggcggcggtgttcgccatacgttgttcgcggtttatcgcctgcaaggcggagacatcaacaatcagtgccacgctgccgtcgccaagaatggtcgcagcagaaatgccggggactttgcgatagttactttcaaggtttttaaccacaacctggtgttgaccaattaattgatccaccagcaaggcgtagcggcgaccgccactttgtaagatcaccacaattccctgggtggcttcggttttcgcgcccgcgacgttgaacactttccacagttcgacgatgggcagatattcaccccgcacttccagcacccgctcgccgccggccagtggatggagatcggcttcacggggttgcagtgattccataacagcattcagcggcagaatgaaaacttcatccgcaacgcgtacggacatgccgtcgaggatggccagcgtcagcggcagtaaaatgcggatcgtagtgccagtaccctgcttcgactggatttcgacatgaccgcccatcttctggatattacgtttaacgacgtccatgccgacgccgcgcccggagacgtcggtgacctgctctgccgtggagaagccaggtgcaaatatcagcatcgcgacttcgtcgtcgctcatgttttcgctgacagtcaaaccttgcgaggccgcttttgccagaattcgctcacggtttagccccgccccatcgtcggtcacttcaatgcaaatgttgccgccctgatgttcggcagacagaattaaatttccgacgctgtttttacctgcggcgagccgtttttctggcagttcaataccgtgatcgaggctattgcgtaccaggtgggtcagcgggtcgataatgcgttctatcaggcttttgtcgagttcagtagaactgcccaccagcgtcagttctacctgcttgccgagttttcccgccagatcacgcaccagccggggatagcgactaaaaacatattccatcggcatcatgcgaatcgacatcactgattcctgcaaatcacgggcgttacgttgtaactgccccatgctggttatcaaatcaccatgattaaccgggtccagttcgctggaacgctgggcaagcatggactgggtgataaccagctcgccgacgaggttaattaattgatcaaccttttctaccgctacacggatgctggtggattcattgctgcgcgtcgttttttcccgctccacgcggccggttggcgcttgttcggctgccagtttaagcactggtggggtggatatttttggcgagacttctactgtttcaaaggtaatctgatcggcttcaatcacaaaacagagtaccgctgtgatgtcatcttcggcgatgtcgcccggtaatattgccgagagcgaatccgcccctttcaccacgtcagttaacgttgtcagatgtcccagttcttcttccagcaggtcgacttccccggccttcaggcgcgaaaggataattcgtcgcggcgactgactgcgactctgctcatcttgcggttcacttttggcaaccacacttaatcgggtcactgcggatggcgtttcgcctttcgcttctaatgccagttgacgcaaggcctggcagatataatcgaagctggcggcatccggctcttgcgactgtttataagcgtcgagctgttcttgcatgatgtccttcgtttccaaaaacagattgataatgtcggtgttgagttgcatctcacctcgtctggcttcatcgagcaggttttccatcagatgcgtggtttcctgcaaaacgctgaagccaaaagttcctgcccctcctttgatcgagtgggcagcccgaaagatggcattcaattgttcggcatctggcacttccggctgcaaaaccagcaaatgctgctccatgtcagccaacagttcgtccgcttcatcaaaaaatgtctgataaaaatcgcttatatccatgctcacgctgtcacctcggttcggctgatggcattgtgggaacactgacctgtggtgcaacctcaggtttttccagggcgcttactggctcattctggctttcggcgttttcatgcaaaatggcctgttcggcttgtttgttcagtaccagcaggctgatgcgacggttgacggcatcatcaggtccgcgatcgcttaagcgcatcgttgccgccatgccgacgacacgtaacactttgccgctatccaaccctccgaccatcagttcgcggcgggatgcattggcccgatcggcagaaagctcccagttgctatatcctttctcaccgctggcgtaggggaaatcatcggtatgacctgaaaggctaatacggttgggaataccgttcagtacaggcgcaatggcgcgcagaatgtcgcgcatatagggttcgacatcggcactgccggttctaaacatcgggcgattctggctatcgatgatctgaatacgtagaccttcctggaccagatcgattttgagatggggacgtaacgcccgcagtttcggatcggactctatcaactggtcgagatcaccccgcaatttccgcaatcgactttgctccatgcgttttttcagctcttcgatgttcggctgcttattcacttccccctggctttgggtgtaatcatcaccaccgccgggaattgggctttcactattagaaatgcgatcgccgcccgtaaccgcagtcgccagtggagtccggaagtactccgcaatctgaatcagctcttttgggctggagatggagatcagccacatcaccagaaaaaaggccatcatcgcagtcataaagtcggcataagcaatcttccacgatccatgtgctgccccgtggcttttggctttgcgtcgtttgacgacaataatcggatgcgcttgattcttcatgcttcctcggttgtcgtctgttgttgcggatttttcaccgcacgcacatgctcttccagttcaataaacgacggacgttcgctggaatagagcgttttgcgaccaaactcaacggcgataggcggtgcgtaaccgttcagattagaaagcagagtgactttgacgcactgcatcattttgctggtttcggcgcttttctgacgtaaaacagtcgctaatggggaaataaatccgtaagccaataaaatgccgaggaaagtccccaccatcgcatgtgcgataagcgcacccagctcggcggcaggacgatcggctgaacctaacgcgtgaacgacccccattacagccgcaacaataccaaacgccggaagtgagtccccgaccagcgccagactgttcgccgggacttctgcctcgctttcgtgcgtctcaatctcttcatccatcagagcttcgatttcgaaggtgttcatgtgaccgctgataatcaggcgcagataatcgacgataaaatcaagcatgacgctatccgcgaggatgcgtgggtagctggcgaagatctcgctctcacggggattttcaatatcacgttccagcgaaaacatccccatctgccgcgatttcgccatcaaccgataaagcagagccagcagatccatatacattgctttggtgtatttggagcgacgaaacagcaacggcagcgccttcagcgtgcctttaatcgctttgccattattgccgacgataaacgacccaatccctgcaccggcaataatcaccagttcagcgggttgatagagtgctccaaggcttccaccggtcatcaaataaccgccgaaaactgtaccgagaacaaccaggtaacctaataagataagcacgacatcatccttccactgttgaccatgacaggatgttcagtcgtcaggcgttaacgcgcgattggggcaaaaaaaagcagcggtacgtcgttaccgctgctggaatgttgcgcctcaccgtatcagttaaacagcctgtactctctgttcatccagcagttgtgggataatatcggcaggattctgggaaagtttacgtctttttactgcccgggatggcggttgacataagctgcaggcaaagctgccaacaggctggtgagcgtgggtaataaaattgccgccgcagcagttgcagctggaaagttgcagctggaaagttgcagtaatccactttcaacaaaccgcaccaatgtccaggcacgggttaatgccagcagtggtccttcttctgcttgtgggcactgttcaaggtataaacggtaggctttgatcaccgcatcgacgccattacacaaaccggttttcagtaaaaactgccatgcattacagaacatcgaagcatgaacgttttgttcccaggtcataaaccagtcggttgagaatggcagcatgcctttcggcggtgggcttccgcgcagttctttataaagttttatcaggcgtccgcgacttaactgtgtttcgctttccagcatctgcaaacgagcgcccagggtgatcaattccattgccagctgaatatcccgcgcttcctgaacaatgcttttttcactcatgatcaggcccttttcttgcgcagcgcttcttcaggctgattaacatcattcagcaagcgtgttgagagcatgatgccggtatgaatttgctggagatcgtcaacgcgggaatcttgcgtcaactgagtaatcgtctggtggctgtcaaaacggaagtgacaaaccagttgattggtttctgccagcttaaccatttgcggaagagtcagtgccgctaacgttgtcgccatttcttcatttatgccgagacgaaacatagcggacgctttgtcctgaacaatcaaacgctgtgcaagtagtaaatatgacaagttgatgtcataaatgtgtttcagcaactcggaggtatgcattattcccacccagaataaccaactttatttttatgcggtttcaccgcaccccgtgatgtcgccgggaagccccggtaaaaaataattagcattagaatagttgcgataagctgcaataagcagaaccacctttttggtttaatatgtccttacaaatagaaatgggtctttacacttatctaagatttttcctaaatcgacgcaactgtactcgtcactacacgcacatacaacggaggggggctgcgattttcaataatgcgtgatgcagatcacacaaaacactcaattacttaaggaaggtgcgaataagcggggaaattcttctcggctgactcagtcatttcatttcttcatgtttgagccgattttttctcccgtaaatgccttgaatcagcctatttagaccgtttcttcgccatttaaggcgttatccccagtttttagtgagatctctcccactgacgtatcatttggtccgcccgaaacaggttggccagcgtgaataacatcgccagttggttatcgtttttcagcaaccccttgtatctggctttcacgaagccgaactgtcgcttgatgatgcgaaatgggtgctccaccctggcccggatgctggctttcatgtattcgatgttgatggccgttttgttcttgcgtggatgctgtttcaaggttcttaccttgccggggcgctcggcgatcagccagtccacatccacctcggccagctcctcgcgctgtggcgccccttggtagccggcatcggctgagacaaattgctcctctccatgcagcagattacccagctgattgaggtcatgctcgttggccgcggtggtgaccaggctgtgggtcaggccactcttggcatcgacaccaatgtgggccttcatgccaaagtgccactgattgcctttcttggtctgatgcatctccggatcgcgttgctgctctttgttcttggtcgagctgggtgcctcaatgatggtggcatcgaccaaggtgccttgagtcatcatgacgcctgcttcggccagccagcgattgatggtcttgaacaattggcgggccagttgatgctgctccagcaggtggcggaaattcatgatggtggtgcggtccggcaaggcgctatccagggataaccgggcaaacagacgcatggaggcgatttcgtacagagcatcttccatcgcgccatcgctcaggttgtaccaatgctgcatgcagtgaatgcgtagcatggtttccagcggataaggtcgccggccattaccagccttggggtaaaacggctcgatgacttccaccatgttttgccatggcagaatctgctccatgcgggacaagaaaatctcttttctggtctgacggcgcttactgctgaattcactgtcggcgaaggtaagttgatgactcatgatgaatcctgttctatggctccagatgacaaacatgatctcatatcagggacttgttcgcaccttccttaacataaatgtataagtcatacttttgttttgggtgtatttcaatctgttaaaaagtttttcgctacgctagcaagcaaaaatgaaacaggaataatcgaaatgggatgttgcgcacagtcaaaataactcaccgtaaataatcatctgctataaataatcactttcatgcaataccagataagctatttttaaacagacacttaccgcacaacaaactaattaaatacaaagaaaggcaacaatcaacttaatgttaatgaaatgttttacatatattaaccacttgtttaatgcggagaatcagtacactattttcttataattacatttgaaattatatgatcaccgggagtgattgattaattatctttactaataatcagactaatatttacctgtttgaccgagttgggattgcgtcgtttctccattaggagtaaagctttaatgtcacctgaagttcacagaataaggaacaggttatgagctatagcaatattcttgtcgctgttgcggttacaccggaaagtcagcaactgctggcaaaagcggtatctatcgccaggccagtaaagggacacatcagtttaattactctcgcttccgacccggaaatgtacaatcaattagctgcgccgatgcttgaagatttacgcagcgtgatgcatgaagaaacgcaaagctttcttgataagttaattcaggatgcggggtatcccgttgacaagacgtttattgcctacggtgagttaagcgaacatattctggaagtatgtcacaagcatcatttcgatttggtgatttgcggtaatcacaatcacagtttcttttcgcgagcatcctgctcggcgaaaagagttattgcctcaagtgaggtcgatgtgctgttagttccacttacgggagattaaccgctcctacgcaagctttggaaaggtagcaactttatcgcgctgctggctttccgcgcttcgcggaactatctgctttaggtcgctaatgaagcactcctgccagtggttaatatcgtttttcacgataacgtccagcatttctgcatgacgggaaatacgttccgccagcgacatagtcaatgcacgatccagcgcagctgcaacttcgtcacgatcgtaggggttaacaattaacgccgacgttaactcgtttgccgctcccgcaaattgcgaaagaacaagaacgcccggattggctgggtcctgagcagcaacatactcttttgctaccaggttcatcccgtcacgcagtggcgtcactaagcccacgtcagagtagcggaatattttcatcagtaatttacggtcaaaatgctgattcaaataataaagcggcgtccagcctaattgcccgtatttaccattaattcgtccagcttcattttcgagctgatgacgaatatcctgataggcttgcacatcaccacgcgacgttggtgcaatctgggtataacgaattttaccatgatgctgcggatatttttccagcaacgcttcataggcgagaaaacgctctggcaaacctttggaataatccagccgttcgacagaaaagatattttgtacgtttttcagttccgctttaagttgcgccagttttggcggcagtggcccggcagcctgtttggctatttctttcggttcaatgccgatcgggtagacttctgttcgaaatgctttgccccaggctgtatggctttttgcgctacgtgtcgtgacgcgggtcaggttagaaagacaatccaggaacgccagacgatcgttttctgtctggaaacccagcaaatcataatcacaaagctgttcaagcaaggtgtcatatgtcggcagcgcgttgaagatttccggtgtcgggaaaggaatatgcagaaagaaaccaatgcgattattcactccccgtttgcgtaattcatgcgcaaatggcaacaggtgataatcgtggatccagataatgtcatcgtcttgcaacagcggcagtaatttatctgccagcaacgcatttacgcgtagatagccgtcccaggcaggacgctgaaattgcaccagatcgagccgataatgaaaagcgggccagagaacggcattggagaattggttgtagtattcgtcaaggtcctgttcgctgaggttaaaagaggcccacgtaatgttaccttttttcaccttttttagcggctgatcctcattccctgtttcaccactccagccaaaccacagtccgcctgcggctttcagtgcccccagtatgccaacggcaaggccaccggcactggcggcgtgctcgtctggtggtgcaatccggttagatactacgactaaacgactcatagtcatcactcctgttattttctcttttttgttgtaatgcggtggttatcatttcaagccagctccagacatccggcacacccgccagtcgccatgatgcctgagttgcacctgtgccaatttttactgacattccgcccagtcggttaacgactgcgaagccagattcatcggttaaatcatcgcccagaaatacgggcgttcgcccgataaagggagcttcctgcataaaagctgcaattgcctcacctttactggtacctctcggtttgatctcgacaacacactttccctgctgtaacgccatttgtggccagatctgagtaatacgttgcgctaatgtcattaatgcgtcttcatgctgcggagcctgacgataatgcagcgcaaaagccatccctttcgcctccagctccgcgccgggatactgagcgatgactgtatgcagttgcacgctaatatcacgcgcaatcgcatccggcagatgaacgatatgtgttttaccattgatgtcacggcgctccgccccatgcacgcccgctaacgggaagcgataaggttttgccagtgcgtcaagctccaccattgagcgccctgatatcaatgccaatgcaccatcacttgcggttgccagtagctgtagtccttgcagaatattgtcaggcacgacgacctgatcgggatgcggtttgatttccgccagcgttccatcaagatcaaaaaaccaggcatatttcgcggatagttcaggggtttcggttaacggttctgtcacccggttctcctccttctcttttcttattgtgttgcgcagaacgcgctttacagacatgtaagtatagacagtgtgacgggggtcgccatttgcaacgaagaacagccaaccgttatggcggttggctatggtgggaaaaaacgctaaattgttgcagaaaaaagcatcagacagtgcgtttcgctttttgcttgtaacggtcgaagatcaccgctgccagcaggattaagccgcgaaccacgtactgcgcgaaaggagaaatattaagcaggttcatggcgttttccacggtgcctaaaattaagatacccgccaccacatatgagatttttccgatgccacctttcagagaaacgccacctaaaacgcaggcggagataacaatcagctcataaccaatcgacgtcattggctgcccactggtcatacgtgaagccagaataattccggctatcgctgataccaggcctgagagaacaaagataataattttggtgcgaacaaccggtacacccgccagacgcgcggcctcttcgttcccgccaatcgccagggtgttacgaccaaaggtggttttattcagcagcaaaccaaagataatcagacacgcgacggtgagccagattggcgcaggcagaccgaaccagttggcgtaaccaagggcaaagaagctttcatcttcgataccgaccgctttaccgtctgaaatgatgtacgccagacctcgaacaatctgcatcgttgccaatgtcgtgatcagagcatttattttcagtttggcgataacaaagccattgaccaggccacagagaacgcccagcaacaaccccgctgccacgccaatccacaggctttcagtcaggttaataaccaccgccgtggtgacacccgcacaggcaattacggaggcgacagaaaggtcaaagtcaccggaagcgaggcagaacaacatgccacaagccaccatccccgacatggaaattgccaggcccaaccctttcatattaatgaaggtggcaaaatttgggacaaaaatggcacaggcgataaagagcaccgcaaacaccaccagcatgccgtactgatcccagatacgcccgaagctgaatgacgacttaggtgcgccagaccccgatgtagaaacagaagacatcatactctccttactcaggcaacagcctggctgactttaggcatcgcaaggctcagtgcctgacgctcatctgcctgctcgtgtaacaattcaccggcgatttcaccttcccgcatcaccacaatccggtcggcaacgccgaggacttcaggtaagtcgctggaggcaaacagcaccgccacgccctgcgccgccagcgcataaattacgttatatatttcgtgcttagcgccaacatcaatgccgcgcgtaggttcatccagcaaaatgaccttcatctcttccgataaccagcggcccagaatggctttttgctgatttccgcctgagagattcatgatcagttgctccgcgcccggcgttttgatgttgagcgaacgaatgtggtgatcggcattgttttcttcccaaccgttgttgattacacaaccgccgagcacatgtttacgtctggcactgatgttgatattgtcgcgaacggagtgcacgggaataatgccttccgctttgcgatcttccgggcagagcatcatgcctgcggcaatggcgtggctcggtttacgaatatcgatcggctgttggtcgatataaacctgaccggcggtgatttgcgtcccgccaaacatgcctttcattaattcgctacgccccgcccctaccagaccaaacagcccaacaatttcaccactgcgaaccgccagacttattggcgtacgcacgcctggtgctttcacagcatcaagacgtaggcgctcctcgccataactacgcggttgccagccgtagatatcgccaatgtcgcgcccgaccatcgcctgcaccagcgcgtcgtggtcaacctgctgcatatcggtaaaggttttgacataacgtccatctttaaagacagtaatggcatcgctgagggcaaatatttcttccatacggtgagaaacgtataagattacccgcccctcttttcgcagttcacgaataacgcggaaaagattgtcgatttcacgggcagagagggagctggttggctcatcaaaggcgataattttggcgttacgcgccagcgctttggcgatttcaaccatctgccactgaccaatggagagatatttcagcggcgtgtccgggtcaatatccataccaagatgtttaagttgtaaacccgcctcataattcagcaatgagcgattcacaatgccgcctttatgcggcagctggccgagatagatgttttccgcgacggtcatttccggcacgagatgcagttcctggtaaataatcgccacgcccgcgttaagtgctgcggtcgtgtcggaaaaggacatttcctgcccattaatcactacagaacccgtggttggcgcatagttgccgctgaggatttttaagagagttgattttcctgcgccattttcacccatcaacgcatgaacctgaccggcatagcagtcaaaactaatatccgtcagcgccttaacgccgggaaacgttttaccgatgccgcgaaatgagagatacggggtagactgttgcataacgtctccgtgaatcactggtcgttcacaccccctctgcatcatgcagaggggaatttttccggcaaattacttaccgcctaaaccttttttctccagttcttctttaaagttgtcacgcgtgatcagtaccacgtcggtaacttcggtaaattttggcggttcaacgtcttttgctacccagttgtaaagcatttcgctggatttatagccatgtacgtccgggcttggcagcagggaaccgtagaagccggttgcctgtgctttagacagttcgctcaccgcatccacaccgttaatgccaatgccgatgatatcggccgctttaaagccctgaccttccgtcgcgcgtacgccgcccagcacggtgctgtcgttcataccgacgatcagccaatgtttaacttccggatgttgaaccagcattgagttggcagcgtcaaatgcccccgggatgtcgttagatttggtaggtacctgataaatttgtttttccgggaatccggccgctttcagcgcatccatagatcccgtagtacggcggcgggcggtatccagttcgttggcggtaatcgccatcaccgcgctttctttgacatcccagccacgtttctgcatctctttatacagttcctggccctgacgttcgccaattttagtcgccgccatcatcaccagcggaacggtatccattggcttacctttggcgttaacaaactggtcatccacggcaatgactttcatatcgtagccacgcgctttcgcgacgatggcagagccgagtttggggtccggagtacaaataacgaaaccttttgcgccactggcagccaggctgtcgatcgcgttcaatgttttttcgccatccggcacggcaatcttaataacctcaaaccctaaatccttcccggctttatcggcaaacttccattcggtctggaaccacggctcttccggttgcttcaccagaaaaccgagcttcaggttctccgccatagcggattgtgacataacggctgccagaccaatggctgccagggctttagtaaatttgtgcatggttctctccagctttagtgtcgttttgtgtagggcaaaaacgaatgacattcgttaaattaatcggaaaacaaagcattaccttttaactaaaagataagtgactgtgttgacatagttttagcgagaaattaattctccataggagagcaatatcacatcgcagaattacagtgagaacgtgcataaatttagcgggaaaagacataagggaaagccaatttgtcagacaaattgtcgaatgcacagcagattaatccataagattagcctggaaatccttgttgtctttggtacccatgcgggatgtcttctttttaaccagtcaataggccgcattacctggcgttgagtttttgaaatggtgtaataaccgcaactcaaagatgtggaaaatgcacgtcattcatttcgtcattaattatcactgtgctcattaattaacagaacacgtataatgagagccatctcgcaaaaatgaaaaaacgttttataaaatcatcacttcatcatgaattcaaattcattgattaatatcaacaagatacaaaaagcactatcattaaaattcattgcagttacattgatttcatcaatgaaatgtaaaaatatataaacttgatgatttaagcattttcttatacccgttcagacgttattcttatttcagatcatcgtcagaattgactccacgatcacatttcggaccggcagaaaggaattattctgcaaacagtaattatggtgttttgatttatcttgcacctctccacttctggatataaggatattaggtatggcaaccgctggaatgcttctcaaactcaactctcaaatgaaccgcgagttttacgcatccaatctctaccttcacctgagtaactggtgttctgaacagagtctgaacggcaccgccactttccttcgcgcccaggcacagagtaatgtgacccaaatgatgcgcatgtttaactttatgaagagtgtcggcgctacccccatcgttaaagccattgatgttcccggtgaaaaactgaactctctggaagaactgttccaaaaaacgatggaagaatacgagcaacgttctagtacgttggcacagttagccgatgaagcgaaagaactgaatgatgattcaaccgtcaatttcctgcgcgatctggaaaaagaacagcagcatgatggtctgttgctgcaaaccattcttgatgaagtgcgcagtgcgaaacttgcgggtatgtgccctgtgcagaccgaccaacatgttctgaatgtcgtgtcacaccagctgcattgatcatcatcggcgctaatgcattgcgccgatgaaggttttgagaaaccgctgcctcatctgtttgaagcagaggtttttttaatgggattcaccctgtggggtaaacttgagttcaataagcgcgatggctttttggattgcccgcatggtgaccgggtctgcggcggcgggatggttagtaaagtcgatattcttcagctgactggacattttttcacgaacttcaacgggcgcgattacatcgagaacatccagaatttgtttgataaccaactggcaagcaaccacatcagaaaccaattcctgatcggcattcagcggctgggacatcgtaaactcctgatagcattttgaaagccgttatagtagcgacttcacatcttcagcgatagtcacatccaccgtcatcaggacacaaaaaaacctgccggagcaggttttttgttatcggaacatattgcctggcggtacgtctttgaacgtcttgcaatagttattgaacatacttttcaggattttgcgcagtttcatcgcggcactccgaccatttgttatacaggtgttattgtctttgcgcttataatatgacaaccatcacaaaaatcaatctttatgtgatacaaatcacataaatacccctttaatgttataaaaatgataatcaaaaaacagcccccctatttctgacacctacagatggcaagaaatagcgcctgccaggcgtcttttccggccattgtcgcagcactgtaacgcgtaaaatagtgctttctcttactcttctggctggaccatgagacttctgattctgactctttcattaataacgctggcggggtgtacggttactcgccaagcccatgtgagcgaagttgacgcggcaacaggtattgtacggttagtttatgaccaggcttttttgcagcatgcccataccgatcgttatgtcagtcgcgggatcgccgatcgcgcatgccagcaggaaggctatacccacgcggtcccctttggtcagccagtaggcaactgtagcctttttgcgggttccttatgtttgaatacggaattcactttgtcatatcagtgccatcattccgccttccctgtctttctctaaatattttaatcagcgaggggatcttcgctgattaaagaaatagcggtaatgcgttttattcccattcgtatttttaataattgaagtttatattttaccttttgcaaataataaaataacaaattatagtgacgccacagcaacaaatataacctttgtggagcactatcatgctgaaaccagaaatgattgaaaaacttaatgagcagatgaacctggaactgtactcttcactgctttatcagcaaatgagcgcctggtgcagctatcataccttcgaaggtgctgccgcgttcctgcgccgtcacgcccaggaagagatgacgcatatgcagcgtctgtttgattacctgactgataccggcaatttaccgcgtattaataccgttgaatctccgtttgctgaatattcctcacttgatgaattattccaggaaacctataaacacgaacaattaatcacccagaaaattaacgaactggctcatgctgcaatgaccaatcaggactacccaacatttaatttcctgcaatggtatgtttctgagcagcatgaagaagagaaactgttcaaatcgattattgataaattaagcctggcaggcaaaagcggcgaaggtctgtattttatcgacaaagaactctctaccctcgacacacaaaactaatgctctccggcggcaggtttactgccgccgtttcaaatcagtgacggcaaatcttactctgatcggtcgaaaaaccgtctttcgaaggtataaatttgccttttgctgccagaaacgctaccagctctcccgctgtcatcccttctgccgagcaggtgtgaaaacgtgcctgttcaccaaaacgcgctttaatcgcagcttccagactggcatgcgtatattgctcgcctgattcaatcatcatatttaacacttcatgaccgtgaatagagtccatcgtccctcctcaaaaaaagcctagcgtagcgattgccgcttatgaagactttgcgccagcgcaggactgaatgctttttattgtacatttatatttacaccatatgtaacgtcggtttgacgaagcagccgttatgccttaacctgcgccgcagatatcactcataaagatcgtcaggacagaagaaagcgtgaaaaacagaaccctgggaagtgtttttatcgtggcgggaaccacaattggcgcaggcatgctggcaatgccgctggctgcggccggtgttggttttagcgttacgttaatcttgttgattgggctttgggcgttgatgtgctacacggcgctattactgctggaggtgtaccagcatgttccggcagataccggtctgggcacgctggcaaaacgctatctgggacgctacggtcaatggctgacgggcttcagtatgatgttcttaatgtatgctctgactgcggcatacatcagcggtgccggtgaattgttggcctccagcatcagcgactggacaggtatttctatgtcggcaaccgctggcgtgctgttgttcacttttgttgccggtggcgtggtttgtgtcggaacttcactggtcgatttatttaaccgttttctgttcagcgccaagattatttttctggtggtaatgctggtactactgctgccgcatattcacaaagtgaatcttttaaccctgccgttgcaacaggggctggctctgtctgcaatcccggtgatttttacgtcgtttggttttcacggtagcgtgccgagtattgtcagctatatggatggcaacattcgtaagctacgctgggtgtttataatcggtagtgcgatccccctggtggcatatattttctggcaggtggcgacgcttggcagcattgattcaacaacctttatgggattgctggctaatcatgctggattaaacgggctgttacaggcgttacgcgaaatggtggcctctccgcatgttgagctggcagtgcatttatttgctgatttagccctcgccacgtcatttctcggcgttgcgttaggcttatttgattatctggctgatttatttcagcgttcaaataccgttggtggacggttgcaaactggtgcaattacgtttctgccgccgttggcgtttgcactgttttatccacgaggatttgtgatggcgctgggttacgccggtgtggcgctggcggtactggcattgattatcccttcgctgttgacctggcaaagcagaaagcacaatcctcaggcgggttaccgggtcaaaggtggtcgtccggcgctggtggtggtgtttctctgtggtattgctgtgattggcgtgcaatttttgattgcggcagggttgttaccagaagtggggtgatcagatagcctcaaattccttattgggtgccagaattaacgctgacacccaatttggcctcttaatgcaggcagcactgcttaaatttcttaccactaccgcacgggcaaggatcgttacgccccggtttctcttctgctttgatcggttgctgaacagctttttcctgcggatgcgccatccagtacgcatgtagatcaagcgccgccagtcgaatggcatctacgctctcttcaaacgcttctggcgacatcttttctacccgctcgaagttttcctcagtaccgtgcagcgcaatcgcctccagcgctggttttaacgaatcgggcaacgttgaccagtcagaaagtgccacgccccgcatatagccaaagcaccactcctcaacaatcgtcagctcgctgccatcaacttctcgcaagccgaataacggctcaaactgctccgggaattcgttcagacgctctgcggtatcggccatatgttgaaaagccagattcataaagcgcgtcatctctttctctgacgcccagcgcggcacatagtcagccccaccccacacggcaaccagccactgttccggttcaatctcttgcggagaactcaacaccgccgtcaataaaccgtccagctccgccacatcaaggatggcgtggtcagtgttgtatttggtcagaatatcgtccagccattccaactcactttcgtttaacggtcccgttttcatacgcttttccttgtggatctcaactcgccagcacctatcttacatgccggtccgtatcagagatactttttgagtggctttgctggtgattaaaaattaaggagggtgtaacgacaagttgcaggcacaaaaaaaccacccgaaggtggtttcacgacactgcttattgctttgattttattcttatctttcccatggtacccggagcgggacttgaacccgcacagcgcgaacgccgagggattttaaatcccttgtgtctaccgattccaccatccgggctcgggaagaaagtggaggcgcgttccggagtcgaaccggactagacggatttgcaatccgctacataaccgctttgttaacgcgccaaattcttcaggcctttcagccagacatccgcttgacgccgatgtcttttaaactggagcgggaaacgagactcgaactcgcgaccccgaccttggcaaggtcgtgctctaccaactgagctattcccgcattcatcaagcaatcagttaatcacttgattttattatcgtctggcaatcagtgccgccgttcgatgcgttgcattctacttacctggcgcgatgagtcaacgatatttttcaccacttttgatcgtttgctgaaaattacgccgaaacgatcactgatcaagcaaatctgcacgcgcagcgctcaaatattgcaacattgaccacagagtcagtaccgcagccacaaagaaaagtgcaataccggcgtactcaacccaaatgttcggacgccacagcagccatgccaacgccaccatctgggcagtggttttcactttcccaatccaggagacggccacgctactgcgtttacccaactccgccatccattcgcgtagcgcagaaataataatttcacgggcgatcatcgttgccgccggtaatgtcacccaccagctgtgataatgctcggttaccagcaccatggcgatagccacgagaactttatctgccacagggtcaaggaaagcaccaaaccgggtactctggttccagcggcgtgccagaaaaccatcgaaccagtcagtcaccgccgcgacgcagaaaatgagcgcggcggcaaacggcgaccaggtgacaggcagataaaagaccaatacaaagaatgggataaggatgacacggaacagtgtaagcaacgtagggatattaaattgcataatgacgggtaactatctgttgtcagtaagattacccctatgttgctacagagacatcaatgtttcaacgaccagaagatcttttctgccagaccttgcgaaatacccggcacttttgcaatttcctcgacgctggcgttacgtaaaccttgcaaaccgcccatatatttcaacaacatttgccgacgttttggcccgacgccttcaatggtttccagggaactggtatttttgaccttcgcccgttttttacggtgcccgccaatcgcgtgatcatgtgattcatcgcgaatatgctggataacatgcagcgcgggtgaatctggcggcaaactaaatccctcaccttccggctcaaagaacagcgtttccagtccagccttacgatctgctcctttggcaacgccaagtagcagcggatgatttttatcccatgagacatccagttcggcgaagacatttttcgcctgcgcaagctggcctttgccgccgtcgataaggatcacatccgggatcttactgtcgtcaatggctttaccataacgccgacgcagcacctgattcatcgccgcataatcatcgcccggcgtgatgcctgtaatgttatagcgccgatactccgcacgcagcgggccgttagcatcaaacaccacacaggaagcgacggtttgttcgcccatggtatggctgatgtcaaagcactccatccgcttcacttccggcaatttcaacacgctggcaagcgcggtcagtcgctggtgaacggtagattgctgcgaaagtttgctggttaaggccgtcgccgcattggtgcgcgcgagtttcagataacgcgccctatcgccgcgaggtttggtttgaacattaatcttgcgtcccgccagttctgaaagggaatcggcgagcagcgttttatcgctaagattaaaatcgagcaggatctcacccggtaaggtgcgcatctggctgccttgtaaatagaactggcctacgaaggtttctaccacctcgctcagttccgtaccgccaggcactttcgggaaatagctgcggctgccgagcactttgccctgacgaatgaacaatacgtggacacaagccatgcccgcatcgaacgccacaccaataacgtcgaggtcgtcgccggtattggaaacgaattgtttttcggtgacgcgtcgcaccgcctgaatttggtcgcgaatacgtgcagcttcttcaaactccagattctggctggcagtttccatacgactaatgagttgcgtaagcacctgatcatctttgccagacaaaaacaggcgcacatactcgacctgctgagcgtattcttcttcactcaccagtccttcaacgcacggtcccagacagcgccctatctggtattgcagacacggacgcgagcgattgcgataaacactattttcgcactggcgaatggggaaaatcttttgcagtagcgccagtgtttcacgtacggcatagccattcgggaacgggccgaaatattcacctttggcatgcttcgcaccacgatgcatcgccagacgcgggtgggtatcaccactcaggaagataaaaggatatgatttatcatcgcgtagcaaaacgttgtaacgcggctgatagagtttgatgtagttgtgttccagcaacagcgcttcggtttctgtgtgagtaaccgttacatcaatttgctggatctgggcgaccagcgcttcggttttgcgcgaagcgaggttgctacggaaatagctggaaagccgttttttcaggtctttcgctttgccgacatagataaccgtaccaccagcatcgtacatgcgataaacgcctggctggctggttacggtttttaaaaacgcttttgcgtcaaactgatcactcactgacttgataatgtctccgcattacacagaccatggcgaattgccaggtgagtcagctcaacatcgccatgaatgtttagtttactgaacatacgatagcggtagctgttcaccgttttcggactgagattgagctgttctgagatctcattgaccttctggcccttggtgatcatcagcataatctgcaattcacgttcagacaaactggcaaatgggctttctgttttttctggttcgatctggcttaacgccatttgttgagcgatgtcagaagcaatgtaacgctgccctgaatagacagaacgaatcgcactcacgacttcctgcggagccgcgcctttgctgaggtagcccgcagcaccggcctgcatgactttcgctggtaaagggttttctgtatggacggtaagcatgatgattttgacatcagctgtggaacgcgcgattttacgcgtcgcctcaagaccgccaatgcccggcatactcatgtccattagcaccacgtcaacggcatttgtccggcaccacttaacggcgtcttcaccgcacgatgcctcaccgacgacttttataccctttatatcttccagaatgcgtcgtatccctgcgcgcaccagttcgtggtcatcaacaagtagaacgttgatcaaaggaatatctccagaaatagggataacgctactgatagttagtcattcgtatattagcggtttttattgcaactttgaaacgttaaaaatggtgggtattcgatttttctctcgtttttgtcaattcgattgtccacagttatggtcacgcccgtcaccaacggcttaccggatcgtttcacagtaagccctacgatgaaatgtgacaaaaattgactttattcagcaaaaatgaaaatcagcccgctgaatatgtaacattaattaacccgaacaatacgggcaaaaaacattcatgataaaaatatttattggtcattatattaacgtattttatagcactgccgatatcacgctcaaaaaacaaccactgctatttttagcaaagcttatggtatactccgccgccttaacatttttcaccgcaaattttcattgcaacatgacgaggaaaataaatgagtacgcctgatttttctactgccgagaataatcaagaactggcaaatgaagtctcctgcctgaaagcgatgctgacgctgatgctgcaggcgatgggacaagctgacgcgggccgcgtgatgttaaagatggaaaaacagcttgcgctgatcgaagacgaaacccaggctgcagtattttccaaaacggttaagcaaattaaacaagcctaccgtcagtaatataaaaccggctgatagcgtgcctttcagccggtttttgcatctggcacgcaggacagaaaagagatcaaattaagccagtagcggccgcgtaacaggcaacctgggtcttatttggtgcattaatttttttctgcatgtttttctggtggaaattgaccgtattctcagagattgacaaaatcatcgctatctctgctgatgttttcccttccgccgtccacctcagaatttctttttcgcgcttgctgaaattcatctctggcgtcatcactatttcatcatttaaacgcatcagagccatcagactttcgcgcaccagtaactgcatttttaattgcagttcatcactaagaatgggtatttcgcgcgcgctgcaacgggaaaaggacaaaaagcccagcgcccggtttggcagcattaaatactgagtgacaccgcggcgtaaaccatgtgcgcgcgcggcttcccataacggctgtgcttcgctgaataagtcatcattccacattaaatggccctgactaaagttttcagggttcagcaccggatcaattgcgagaaagttttttgcctgataataactaacccacgcctcagggtaattggtgtaaaaagccactttaggtcgagtgaatggtaccgggtggcggacacataacgaatagtaatcgtactccagctgctgagcctgaagctcaatttcatggtagacctcttctgcggtctccatcctctgaaaacgcaacagcatcgtgcgacgccagctgaaaaaatccttatcctgcatagtaaaccgcaacgcccctgagagtgagtatcatttataatgataattcaaactatcacataaataagatttatatataatttatattattcaggcaatgaattacttttgcaagccatcgcattctcttatgttattaatgagttatgctgatttgttaagcagttttatcaggcttgaaatggcgtccagccccgacaggtgaatcgtcggggctgattttttcttattattgcagcagaaacttctcgaggaactggcgggtgcgaggctgctcggggtcggcaaataacgcttttgcggccccctgctcgactatccgcccctggtccataaagatcgcccggtccgcaacatcccgggcaaagctcatttcgtgcgtcacaatcaccatcgtgcgcttttcctgcgccagctgacggatggtgttcaggacttcacccaccagctctggatccagcgctgacgttggctcgtcaaacaaaatcacctcaggacgcattgccagcgcacgcgcaatcgcaacacgctgctgttgaccgccagacaaacgacgtggatagctggtttctttacctgccagcccaacttttgccagcagctcgcgagcgcgcgccgtggcctcttctttcggttcacctttgacgatcaccggcccttcaataatgttctccagcaccgtacgatgcggaaacaaattaaagttctggaagacaaacccgacgtgctgacgcaactggcgaatcagagatttttgctgacttaatgaacgtgcagtatcaatagtgatatcgccaacggtgatcgttcccgcttcgggttgttccagcagatttatgctgcgtagcaacgtggttttgccggaaccactcggaccgataattgccaccacttcgccaggctttacctcaaggtcgataccgtgcagcaccgtctgaccgtggaattttttcaccaggttcttaacttcaatggcactcattttggttctctctcctggcgattaagttgattctcaaaatggttctgcaacgtcgataacacagtcgccatgatccagtagatgagcgaagccgccagatacatggtgaacacctccagcgtacgcgaggtaatcaactgcgcctgacggaacagctccggcacctggattgtcgcggccagcgacgtatcttttaccaggctaataaagctgttcgacagcggcggcaacgccacacgcgccgcctgtggcaaaatcgcgcgacgcatggtctgccacggcgtcataccaatactggctgccgcttcccactgacctttatcaatagaagaaatggcggcgcgcagcgtttcggcagcataggcggcagtgttcaacgacagaccaatcattgctgacggaatgggatctaattcgataccaaactgcggcaggccgtaatagatcataaacagttgtgcgatgagcggcgtaccacgaaaaatagagatataaaaacgcgccagccagcgcacgggccagattggcgacagacgcatcagcgcgagaataaacccgagcagtaagccaaaaaacatgccgccgatactgagttgcagcgtatacccagcccctttcagcaggaacggcaaggaatcaataaccagttgtatactttcttgcatgagcgtttccggagctaaacgtggggatgataggcgaacagcgcaggcgcaccgccggtatgaataaacagaatcggcccttcatctttgaagcgtttctgactgataccgtcaatcagccccgccatcgcttttccggtatacacaggatcaagcagaatgccttccagccgcgccagcaatttcactgcttccatgccttcgtcgttcggcacgccgtagccaggtgcaaaatagtcatcccagagtaaaatttccgctgatgcggtcagctccagttctttcgcaatcgcctgttgtaggttaaccactttcggcaattgatcggcaacggaacgcgacacggtcacgccaatcagttcgctttcaggcatcaggtgttccagcccaacagccagtccggcgtgagttccggcactgcccgatgcgactaccaccgatgaaatattaaccgccccttcacactgttgcgcgatttccagcgcactctccacataacctagcgcgccaagagcattagaaccgccaaccggaatgacatacgggcgaaagccttgtgcttcgactcgcgtcgccagctcttccagttgggcattgggatcggtcagtgcgtcgcacatttcaatctgggtattgaacagatccagcaacaagcgattgccgttggttaaatagttttctgcggttgtgccaataggattttccagcagcgccacgcagtgcagaccgagtttggcagcgactgcggcagtctgccgcacatggttagactggatcgccccggcagtaatcagcgtatcggcaccttcacgcagagcatctgccgcgagaaattccagcttacgtaatttattgccgcccattgccatgggggtgacgtcatcccgtttgatgaaaatttcccgtcctagataatcagaaaagcgcggcagatattcgagcggcgttggcgcgccgataaactccagccgtggaaaacgggttaaattatgcagtggcataacagcctccgatgtgtgttgttgtgattttcttattatgcacgctgaaaacgcgtaaataaaaaaggcgctagtgaaagcgcccttttttgtcattatgctgattatttggtcacatcagcaccaaaccatttttcggaaagggcttgcagagtgccatctttttgcatttccgcaattgcatcattcactgctttcagcaggtcctcatttcctttacgcagcgccacgccagactcctgacgggagaatgcttcaccggttactgccagcgtatcgttggttttcttcaccagatccagcgccgccagacgatcaacgaggatcgcatcgatacgccctacgcgcagatcctgatatttggtcgggtcatcatcataggtacgcacatcgacgccctgaacattctgccgcagccactcttcatagttggtgcccagaccgacccccacttttttgcctttcagatcatcggctgttttaatggtgccttcgttaccttttttcaccagcgcctgaataccagaaatggtgtacggggttgagaaatcgtattttttcttgcgctcatcagaaatggtgacctgattaatcaccacatcaatacgtttagagtccagcgacgccagcataccgtcccatttggtcggttttagtgacgcctcaacgccaagatgttttgccagctgttgggcaaattccacttcaaaaccggttaatttgccgtcatctccctgaaaactgaacggcggataagttccttccagccctaccagcagcgtgccgcgctctttaactttattaagcagaccttcatctgcaaaacttttaacgctcatgcccgcaaccagcgccacggccatcacacccatcaatgcctgacgtcccagatgtgctaatttcatattcaccccgaatgttgttatgtctgtttgcagtgtagagccattgtttgtaaacacaaaaacaactccgctacatcttattcttatttaatatatatcagaagaaggcaggctggaggatttctgcacaagtctggtacaggtttggcgctgatagtgttgatacttccgtaacgcgatgcggtaattgttggtgctggtggtgggcagccacggggcgaggatttcatcaaggaaaccgtcctgcagctgatcgagggaaatattttgctcgtgtagatgattccccaaacggcgcaaacgaacgacatattcacgcaccgtacctgggctcatttcagtttgctcaaaaagaaattgcttaaagccgataatatcgaaaaaatcactctgcgttttgcaatgtaaatcaccgcaaaatcggcacaatgccgcccatgatttttgttccgtttgccagccattttcatcaagcagcgtgtccaggcgggaaatctcgattttattcactattttgccgtcgcgaactaaggtaatgcgatcgagtaatttacggcaatgcgcgcaatgggtctggctgtgtttaaagtctttaagatagcggcttaatggccgtcttttcaggtgctgcaccatcattaagaactcctggtagtcaaagttaaagtgcggcatttactgacgttataacttacccagtttagtgcgtaaccgtttaatagcctggctgtgtaactgactgacccgcgattccccgacctccagcaccgcgccaatctctttgagattcagctcttcctggtaatagagggttaataccagtttttcgcgctccggcaacgtttcgatggcttccatcacccgctggcgcagattactgtccagtagttgttgtagcgggttttctcgctgatgatcatcagtaaccagttcgatgctatcgccgtgctcttcgcgccactcatcgtaggagaagagctggctgttattggtgtcgagcaacatttggcgataatcggcaatatcgatccctaaacgttccgctacctcagtttccgtggcgttgcggccaagttcctgctccagttgccctattgcctgtgccacttcacgcgcgttgcgtcgcacgctgcgcggcacccagtcacggctgcgaagttcatccagcatagcgccacggatacgctgcactgcgtaagttgtaaatgccgttccttgtagggcgtcatagcgttcgacggcattaagtaacccaatgccgcccgcctgtagcagatcgtcaagttccacgctcgcgggcagtcgaacctgcaggcgcaatgcttcgtgacgcaccagcgggacataacgctgccacagcgagtgtttatccattacaccttcagcggtatagagtgaattcacgataaacagccctgcgttatatgagttatcggcatgattatccgtttctgcagggtttttaatcggacgattagtgggtgaaatgaggggttatttgggggttacaggtaaattccaggcagaaaaaaaccccgccggtggcggggaagcacgttgctgacaaattgcgctttatgttgccggatgcggcgtaaacgccttatccggcctacaaaaatgtgcaaattcaataaattgcaattcaacttgtaggcctgataagcgcagcgcatcaggcaatttggcgttgccgtcagtctcagttaatcaggttacaacgattaaccctgcagcagagacagaacctgctgcggtacctggttagcttttgccaacacggagttaccggcctgctggatgatctgcgctttcgacatattggacacttcggtcgcatagtcggcgtcctgaatacgggactgcgcttcagacaggttggtagtggtgttgttcaggttggtaaccgcggaatccagacggttttgcaccgcaccgagggaagaacggaatttgtctacagatgcgatagcatcgtccagcgctttcagcggatccgtggttttaccatttgcaacagcagtcagagcctcaccaccagcagtcaaacctgtttgcagattaccgccatttaaatcggcagaatcgtatgttttaccatcaatatcgaccacttctgttttgccatcatctccgcccagtttgaccgcggttggagaactggcggcaccggaagagtcagtataggtaatagttttaacagaaacagcaccagtagtttcattcacatccgcagcgtaaagattgccatttgtatctttaagcgcatatgtatcggtatcattacccttggaatcctgcagttttactaagctaacagcaccaaggttggcagttgcggaacctgcagtattatcaatctgaacaggtgtaccgcctgaagtgatagttgtagctttagtagtatttgcatcagttacagttgcatttgccgttgctccagtcgccattgtcactgtaccatcattagcaactgttactgcgtaatacttcccatcgttatcaccaccggtgattttcgcatagtaatcattaccattatcagtataaacaccctcaattgaagctgggttagttccgccagtatcagtggctgcttccgtagaaagggtaattccagtaagtttaatattgtttgtggtggtagcaccaaaagcagttactggagcactagtggtaactgtatcgttatttttaacgctaaaaccatcaaggccaagagttttagcatcaatctgcttcagatcgatagtgatagtctggttatcatttgcgccaacctggattttcatggagccattttttgccagcacgttcacgccgttgaactgggtctgaccagatacgcggtcaatttcatccagacgggatttaatttcgtcctggatagcagacagatcagactcagagttagtaccggtagtggcctgtaccgtcagttcacgcacacgctgtaagttgttgttgatttcggacagcgcgccttcggtggtctgcgcaacggagataccgtcgttggcgttacgggccgcctgagtcaggcctttaatgttagaggtgaaacggttagcaatcgactgacccgctgcgtcatccttcgcgctgttaatacgcaagccagaagacagacgctcgatagaactcgacagcgcagactggttcttgttgatattattttgagtgatcagcgagaggctgttggtattaatgacttgtgccatgattcgttatcctatattgcaagtcgttgattacgtattgggtttccacccgtcggctcaatcgccgtcaaccctgttatcgtctgtcgtaaaacaacctttagaatttttttcaaaaacagccattttttgttagtcgccgaaatactcttttctctgccccttattcccgctattaaaaaaaacaattaaacgtaaactttgcgcaattcagaccgataaccccggtattcgttttacgtgtcgaaagataaaaggaaatcgcatggcaagtatttcatcgctgggagtcgggtcaggtctggatttaagttccatccttgatagcctcaccgccgcgcaaaaagcgacgctaacccccatttcaaatcagcaatcgtcgtttaccgctaaacttagcgcctacggtacgctgaaaagcgcgctgacgactttccagaccgccaatactgcattgtctaaagccgatcttttttccgccaccagcaccaccagcagcaccaccgcgttcagtgccaccactgcgggtaacgccatcgccgggaaatacaccatcagcgtcacccatctggcgcaggcgcaaaccctgaccacgcgcaccaccagagacgatacgaaaacggcgatcgccaccagcgacagtaaactcaccattcaacaaggcggcgacaaagatccgattaccattgatatcagcgcggctaactcatcgttaagcgggatccgtgatgccatcaacaacgcaaaagcaggcgtaagcgcaagcatcattaacgtgggtaacggtgaatatcgtctgtcagtcacatcaaatgacaccggccttgataatgcgatgacactctcggtcagcggtgatgatgcgctacaaagttttatgggctatgacgccagtgccagcagcaacggtatggaggtctcggttgccgcccagaatgcgcagctgacagtcaacaacgtcgccatcgagaacagcagcaacaccatcagcgacgcgctggaaaacatcaccctgaacctgaacgatgtcaccacgggcaaccagacgctaaccatcactcaggacacctccaaagcgcaaacggcgattaaagactgggtgaatgcctacaactcgctaatagataccttcagcagcctgaccaaatacaccgccgtagatgcgggagctgatagccagagttctagcaatggtgcactgctcggcgactccacgctgcggacgattcagacgcagttgaaatcgatgctgagtaataccgtcagttcttccagctataaaacgttggcgcagattggtatcacgaccgatcccagcgatggcaaactggaactggatgccgacaaactcaccgctgcactgaaaaaagatgccagcggcgtaggtgcattgattgttggcgatggtaaaaaaaccggcatcacgaccaccatcggcagcaacctgaccagttggctttcgacaacgggcattattaaagccgctaccgatggcgttagtaagaccctgaataaattaactaaagactacaacgccgccagcgatcgcattgatgcgcaggtcgctcgctacaaagaacaatttacccaactggacgttttaatgacctcgttaaacagcaccagcagctacttaacgcagcagttcgaaaacaacagtaattccaagtaagcaatattcatcgggagacaggtcatgtacgcggcaaaaggcacccaggcctatgcacaaattggcgtcgaaagcgccgtaatgagcgccagccagcagcagctggtcaccatgctatttgatggagtgctgagcgcactggttagagcgagcctgtttatgcaggacaacaatcagcaaggcaaaggcgtctctttgtcaaaagcgatcaacatcattgagaacggactgcgggtgagtcttgatgaagagagcaaagacgaactaacccaaaacttgattgctctttatagctatatggtcaggcgcttgctgcaagccaatttacgcaacgatgtctccgcagtcgaagaagtggaagcattaatgcgcaatattgccgatgcctggaaagagtcgttactctccccttctttgattcaggacccagtctgatgaaccatgcaccgcatttatatttcgcctggcaacaactcgtcgaaaaaagccagctcatgttacgcctggcaacggaagaacaatgggacgaactcatcgccagcgaaatggcgtatgtgaatgcggtgcaggagattgcacatttgactgaagaggttgacccgtccaccacgatgcaggagcagctccgcccgatgctgcgcctgattctcgacaacgaaagcaaggtaaagcagttattacagattcggatggatgaactggcgaaactggtcggtcagtcatcggtgcaaaaatcggtgttaagtgcctatggcgatcagggcggctttgtgctggctccgcaggataacctcttttgaatctgaatgagtcgatggctcgcgaataatccgattacggctacgcttctaatgttccccttgaatggagtcgaagaatgcgtaatcccacgctgttacaatgttttcactggtattacccggaaggcggtaagctctggcctgaactggccgagcgcgccgacggttttaatgatattggtatcaatatggtctggttgccgcccgcctataaaggcgcatcgggcgggtattcggtcggctacgactcctatgatttatttgatttaggcgagtttgatcagaaaggcagcatccctactaaatatggcgataaagcacaactgctggccgccattgatgctctgaaacgtaatgacattgcggtgctgttggatgtggtagtcaaccacaaaatgggcgcggatgaaaaagaagctattcgcgtgcagcgtgtaaatgctgatgaccgtacgcaaattgacgaagaaatcattgagtgtgaaggctggacgcgttacaccttccccgcccgtgccgggcaatactcgcagtttatctgggatttcaaatgttttagcggtatcgaccatatcgaaaaccctgacgaagatggcatttttaaaattgttaacgactacaccggcgaaggctggaacgatcaggttgatgatgaattaggtaatttcgattatctgatgggcgagaatatcgattttcgcaatcatgccgtgacggaagagattaaatactgggcgcgctgggtgatggaacaaacgcaatgcgacggttttcgtcttgatgcggtcaaacatattccagcctggttttataaagagtggatcgaacacgtacaggaagttgcgccaaagccgctgtttattgtggcggagtactggtcgcatgaagttgataagctgcaaacgtatattgatcaggtggaaggcaaaaccatgctgtttgatgcgccgctgcagatgaaattccatgaagcatcgcgcatggggcgcgactacgacatgacgcagattttcacgggtacattagtggaagccgatcctttccacgccgtgacgctcgttgccaatcacgacacccaaccgttgcaagccctcgaagcgccggtcgaaccgtggtttaaaccgctggcgtatgccttaattttgttgcgggaaaatggcgttccttcggtattctatccggacctctacggtgcgcattacgaagatgtcggtggtgacgggcaaacctatccgatagatatgccaataatcgaacagcttgatgagttaattctcgcccgtcagcgtttcgcccacggtgtacagacgttatttttcgaccatccgaactgcattgcctttagccgcagtggcaccgacgaatttcccggctgcgtggtggtcatgtcgaacggggatgatggcgaaaaaaccattcatctgggagagaattacggcaataaaacctggcgtgattttctggggaaccggcaagagagagtagtgaccgacgaaaacggcgaagcaaccttcttttgcaacggcggcagcgtcagcgtgtgggttatcgaagaggtgatttaaattcatccccggcggcaagccggggagatttcattacggcagtggcgtcggtaacggcgctttatccagcgcggcggcacactctgctgtcgggcgatccacacgctccatcgtcataccatcgtactcaatggtgttaccgtcacgctcaacctcgtacagctcacgttttacggtaacgttagtgagatcatcagacatcaatgtcaacttacccggcacggcaatcacccgctgccactgacggcaatccagggtatcgccctctttagtgacaatcaggctgcctatcgcttccgggctgaccagcgcacgttgcggccctttggtctgccagtagcccgccagccagtccggcgcgggggttttcacgacattgttatagttttcgacttcggcacagcccgccagcaacaagagcgcgcctgcaattgcgagttttttcatcattcgtcctgcatgagaagaaaagaggattgtggcattaaagccctgatgtcgccagcctttcaaggttcagagagaaatttgatctaactattatttttgtgaattattaccccgaaaataaatttgcatggtgtatgattcgcgactcttgtttcaaaccttctgagttcagaggctacattcatgtcatggcagcaattcaaacacgcctggttgattaaattctgggcccccatccctgcggtcatcgcggcgggtattctctctacttactattttggcattactggcaccttttgggctgtcacgggtgaatttacccgttggggcggccagctcctgcaactgttcggcgtccatgctgaagagtggggttactttaaaattatccatctggaaggatcgccattaacccgcatcgacgggatgatgatcctcggtatgtttggcggctgctttgccgcagcgctgtgggccaacaatgtcaaactgcgaatgccgcgcagccgtatccgcattatgcaggccatcattggcggcattatcgccggttttggcgcgcgtctggcaatgggctgtaacctggcggcgttctttaccggtattcctcagttctcgctgcatgcctggttctttgccatcgccactgccattggttcatggtttggcgcgcgctttaccctgctgcccatcttccgtattcccgtgaaaatgcagaaagtttctgccgcctcaccgctgacgcaaaaaccggatcaggcgcggcgtcgttttcgtctcgggatgctggtctttttcggcatgctgggctgggcgctgctcacagcgatgaaccaacccaaactggggctggcaatgctgtttggcgtcggctttggtttactgattgaacgtgcgcaaatctgctttacttcagcgttccgcgatatgtggatcaccggacgtacccatatggcgaaagcaatcattatcggtatggcggtgagtgccatcgggatcttcagttacgtacagttaggcgttgaacccaaaatcatgtgggcgggaccaaacgcggtaattggtggtttactgtttggttttggcatcgtgctggctggcggctgcgaaaccggctggatgtaccgcgcggtagaaggccaggtgcactactggtgggtcggtctgggcaatgtgatcggctcaacgattctggcgtattactgggatgatttcgctccggcgctggccaccgactgggacaaaatcaacctgctgaaaacctttggtccgatgggtggcctgctggtgacatatttgctgttgtttgctgcgctgatgttgattatcggctgggaaaaacgcttcttccgccgtgcggcaccgcagactgctaaggagatcgcatgaaaaatatcgttcctgattaccgccttgatatggtgggtgaaccctgcccttatccggcagtcgcaacccttgaggcgatgccgcagttaaaaaaaggggaaatcctggaagtggtgagcgactgtccgcagtcgatcaataatattccactggatgcgcgtaatcacggctatacggtgctggatattcagcaagacgggccgaccattcgttatttaattcagaagtaatccctcattcccgctgtgacccacagcgggaacatcgttacctttgtatcacatagattttacccgcccccactcctattcttttcagtatgatctcaggaggtttctatgtgtggacgctttgcccaatcccaaacgcgtgaagattaccttgcgcttctcgcggaagatattgaacgcgatattccctatgatcccgaacccattggcagatacaacgtcgcgccgggaaccaaagtcctactgctcagtgaacgtgatgaacaccttcatctggatccggttttctggggatatgctcccggatggtgggataaaccgccgctgattaacgcccgcgtagaaactgcggcaaccagtcgtatgtttaaaccgctctggcaacatggtcgggcaatctgttttgccgatggctggtttgagtggaaaaaagaaggcgacaaaaaacagcctttttttatctatcgtgctgatggacaacctatttttatggccgcgataggtagcacaccatttgagcgtggtgacgaagccgaaggatttttgatcgtcactgctgcggcagatcaaggtctggtagatattcatgaccgccgcccactggtactgtcgccagaagctgcgcgggaatggatgcggcaagagattagcggtaaagaagcctcagaaatcgcggccagtggctgtgttccagcaaaccagttctcctggcacccggtatcgcgcgcggtgggtaatgttaaaaaccagggcgcggagttaattcaacctgtttgataagcctggagattattgatcaacaatactgcgtcataagaaatctctattagacaaagatttcattacctgttggcatattgcaaaaataacaccaatacggaatcgtcatgttcacgattaaaacagatgatctcacccatccagcagtgcaagcattagtggcttaccatatttccggcatgctgcagcagtctccccccgaaagcagtcatgctttagatgtgcaaaaattacgtaacccgacagtgacattctggtcagtatgggaaggcgaacaactcgcaggaattggtgcgctgaagttgctggatgataaacacggcgagctgaaatcaatgcgtaccgcgccaaattatttacgtcgtggtgtcgccagtctgattttacgccacattttgcaggtcgcccaggacagatgccttcatcgcctgagcttagaaacgggtacacaggctggatttacggcctgccatcaactttatttgaagcatggtttcgctgattgcgaaccgtttgctgattatcgacttgatccacacagtcgatttttatcattgacgctatgcgaaaataatgaattgccatgagccagacgcagcacattcttgcattcgacgtgctgcgcctttatttatcaccagcaggaaacgccttgtccatagacgccccttccacatgcgccacaagaaacctctattccagtgacacaattgcgcctaattaattacatttaatatttaattatgagttcctcaccatctattacatactttttaaccatatcggaatatttatcataatcagcgggattcgtaacaatatattttcgctgcgatctttcatagcaaatccctgtcaaagtccatgatataaaaatgtctcttcaaaagaattacattctttaaaaagtaattctttattgctatatatcgcagagacaacctcaatatcacactccatacgtgctttctccagatgatttgggaagtattgaatttcttttatcttattatcgccacaattaaacagcttagtagtctcaggcattgctggtatttaccatattttattgcgataaatagaaattgtcatagcctttgacggagatgagtcaacacgcgatatcagattattatctacggagacctgggtaattccatcggatacttttggaaataccatataattattgaaatcgagctctaattctttgcagaatttgggaatttgtattgtggcaaggccattatgacgaagataaagcacctcaatccaggatggaagaggtggcaaagaccccaagtgaagatctgttaagtcaagtttactattgtggagttcaacacatttaaacaatctcaccaatgctatatccacattttttttgaagtcattcgatgcgccttcttttactgaattagcccagtcgctgaaacctttgcaaagtctggaatctgtaattttcgtaaagttgtctagaaactctgcaatattagtcgatataaactctaatttatgccgaatgggtgggttaccagttccctgattttttctatcatgataaaacctatcttattataaatcgagaaatcttgaaaccagagactataatcaccccattcgaaatattctgagtgcaataacttaaattctgacagcatattaaataatttgctgtcttcactaattggtgtaaacttaccatttccaagacaactgactaactcacttgataattcatttatgattgcatcatcagatactaactcatgttgttttatcgtagattcagtattagatgtgactttatttaattgaaccggctgagtttttaacgaaagatcatttaatggaaacatttacactcctgtttaataaattatattgcccagggcgcattctaaaacacaataaaattaccactatcaaaaatcgctcatatccatcgcccggaatatgaataaaaacatcaacaaagattaaattatccagaggttactgttgcgtctgtggtcgtaacaacatccgacgtggtgatgtgtcaaatgagacgctctgatgttcaggggggttatcgcgtatacggatcgtggatggcagaaaacgttcaggatcaggtatccattttaaaccagaaattgagtgagtttgccccatccatgccccacgcggtgagatcggatgtaattaacaacaggttacaaaacctacacctgcatgctcatcacttcctgatacgccgccaccagcttattacgcacctgaatccccatttgcatagaaactgaggctttttgcatatcggtcatcacatcgtttaacgccacgccgggttcaccgagagtgaatttttctgcctgcgtgcgggcagctgtttgtgtatcactaatgcgatcgagcgcggcgtgcagctgcccggcaaaactaatggtcggttgcggcagtgattcctgcgcacgcgcactcatcgccgtagcctgtaactggctgataaccccttcaatcccctgtatcgctgacattctcgtctcccggataatttctggtagcaaagcctaccagtaagtcaataagacaaaggcgctaaatagcaacaaaaaaacgggtttattggcggatagaaaaaaacgaaagcacaaataatgggagcgtcaatttttcgagtttgctgacccgggagtgagtcttgttccactttgccaataacgccgtccataatcagccacgaggtgcgcgatgaatgcgactgcagcccagacaaaatctcttgagtggcttaatcgcctgcgtgcgaatccgaaaattccattgattgttgccggttccgcggcagtggcggtcatggtcgcactgatcctgtgggcgaaagcccccgactaccgcacattattcagcaatctttccgatcaggatggtggcgcaattgtcagccaactgacgcaaatgaatattccttaccgcttcagcgaagccagcggcgctattgaagttccggcagataaagttcacgaactgcgtctgcgcctggcacaacaaggtttgccaaaaggcggcgcggtcggtttcgaactgcttgatcaggaaaagtttggtatcagccagttcagcgaacaggtgaattatcagcgggcgctggaaggcgagctttctcgtaccatcgaaactatcggcccggtaaaaggggcgcgcgtacatctggcaatgccgaaaccgtctttattcgtccgtgaacaaaaatccccttctgcatcggtgacggtaaatctgttacccggccgcgcactcgatgaagggcaaattagcgccattgtgcatctggtttccagcgccgttgctggtctgccgccgggaaacgtcacgctggtggatcagggcggacatctgttaacccagtccaataccagcgggcgcgatcttaatgacgctcagttgaaatatgccagcgatgtcgaaggccgtattcagcggcgtattgaagcgatcctgtcgcctattgttggtaacggtaatattcacgcccaggttacggcgcagctggacttcgccagtaaagaacaaacggaagaacagtatcgccctaacggtgatgaatctcatgcggcgcttcgttcacgccagcttaatgagagcgagcaaagcggttccggttatccgggcggcgtaccgggggcgttgtcgaatcaaccggcacctgcgaataacgcgccaatcagcacgcctccggcaaatcaaaataaccgccagcagcaggcgagcaccaccagcaatagtgggccgcgtagcacacagcggaatgaaaccagtaactacgaagtcgatcgcaccattcgtcataccaaaatgaacgtgggcgatgtgcaacgtctgtcagtcgcggtcgtggtgaattacaaaaccttgccagatggcaaaccgttgcctctcagcaacgaacagatgaagcaaattgaagatctgacccgcgaggcgatgggcttttctgaaaaacgcggtgactcgctcaatgtcgttaactcgccgttcaatagcagtgacgaaagcggcggagaactgccattctggcaacagcaagcgtttatcgatcagttacttgctgccggtcgctggttgctggtactgctggtggcgtggctgctgtggcggaaagcggtacgtccgcagctaacacgtcgcgctgaggcgatgaaagctgtacagcaacaggcgcaggcccgcgaggaagtggaagatgcggtggaagtccgcctgagcaaagacgaacaactacaacaacggcgcgctaaccaacgtctgggggcagaagtcatgagccagcgtatccgtgaaatgtctgataacgatccgcgcgtggtggcgctggtcattcgccagtggataaataacgatcatgagtaacctgacaggcaccgataaaagcgtcatcctgctgatgaccattggcgaagaccgggcggcagaggtgttcaagcacctctcccagcgtgaagtacaaaccctgagcgctgcaatggcgaacgtcacgcagatctccaacaagcagctaaccgatgtgctggcggagtttgagcaagaagctgaacagtttgccgcactgaatatcaacgccaacgattatctgcgctcggtattggtcaaagctctgggtgaagaacgtgccgccagcctgctggaagatattctcgaaactcgcgataccgccagcggtattgaaacgctcaactttatggagccacagagcgccgccgatctgattcgcgatgagcatccgcaaattatcgccaccattctggtgcatctgaagcgcgcccaagccgccgatattctggcgttgttcgatgaacgtctgcgccacgacgtgatgttgcgtatcgccacctttggcggcgtgcagccagccgcgctggcggagctgaccgaagtactgaatggcttgctcgacggtcagaatctcaagcgcagcaaaatgggcggcgtgagaacggcagccgaaattatcaacctgatgaaaactcagcaggaagaagccgttattaccgccgtgcgtgaattcgacggcgagctggcgcagaaaatcatcgacgagatgttcctgttcgagaatctggtggatgtcgacgatcgcagcattcagcgtctgttgcaggaagtggattccgaatcgctgttgatcgcgctgaaaggagccgagcagccactgcgcgagaaattcttgcgcaatatgtcgcagcgtgccgccgatattctgcgcgacgatctcgccaaccgtggtccggtgcgtctgtcgcaggtggaaaacgaacagaaagcgattctgctgattgtgcgccgccttgccgaaactggcgagatggtaattggcagcggcgaggatacctatgtctgataatctgccgtggaaaacctggacgccggacgatctcgcgccaccacaggcagagtttgtgcccatagtcgagccggaagaaaccatcattgaagaggctgaacccagccttgagcagcaactggcgcaactgcaaatgcaggcccatgagcaaggttatcaggcgggtattgccgaaggtcgccagcaaggtcataagcagggctatcaggaaggactggcccaggggctggagcaaggtctggcagaggcgaagtctcaacaagcgccaattcatgcccggatgcagcaactggtcagcgaatttcaaactacccttgatgcacttgatagtgtgatagcgtcgcgcctgatgcagatggcgctggaggcggcacgtcaggtcatcggtcagacgccaacggtggataactcggcactgatcaaacagatccaacagttgttgcagcaagaaccgttattcagcggtaaaccacagctgcgcgtgcacccggatgatctgcaacgtgtggatgatatgctcggcgctaccttaagtttgcatggctggcgcttgcggggcgatcccaccctccatcctggcggctgtaaagtctccgccgatgaaggcgatctcgacgccagtgtcgccactcgctggcaagaactctgccgtctggcagcaccaggagtggtgtaatgaccacgcgcctgactcgctggctaaccacgctggataactttgaagccaaaatggcgcagttgcctgcggtacgtcgctacgggcgattaacccgcgctaccgggctggtgctggaagccaccggattacaattgccgctcggcgcaacctgtgtcattgagcgccagaacggcagcgaaacgcacgaagtagaaagcgaagtcgttggctttaacggtcaacggctgtttttaatgccgctggaggaagtcgaaggtgtcctgcccggcgcgcgtgtttatgccaaaaacatttcggcagaagggctgcaaagcggcaagcagttgccgctcggtccggcgttattaggtcgcgttctggacggcagcggtaaaccgctcgatggcctgccctcccccgatacgacggaaaccggtgcgctgattaccccgccatttaacccgttgcaacgtacaccgattgaacatgtgctggacaccggcgtgcgcccaatcaatgccctgcttaccgttgggcgtgggcagcgtatggggctgtttgccgggtccggcgttggtaaaagtgtgctgctggggatgatggcacgttacacccgcgccgatgtcattgtcgtgggtttgattggtgaacgtgggcgcgaagtaaaagattttattgagaacatcctcggtgccgaagggcgtgcacgctcagtggtgattgccgctccggcggatgtttctccgctcctgcgaatgcagggtgccgcctatgccacgcgcattgccgaagattttcgcgatcgtggtcagcatgtgttgctgattatggactccctcacccgctacgcgatggcccagcgtgaaattgcgctggcgattggcgaaccccccgccaccaaaggttatccaccgtcggtgtttgccaaattaccggcactggtcgagcgtgccggaaatggcattagcggcggcggctcgattaccgcgttttataccgtgctcactgaaggcgatgaccagcaggatccgattgccgactccgcgcgggcgatcctcgacggtcacattgtgctgtctcgccgactggcggaagccgggcactatccggctatcgatattgaagcgtcgatcagccgcgcaatgacggcgttgatcagtgagcaacattacgcgcgagtgcgcaccttcaaacagctgttgtcgagttttcagcgtaaccgcgatctggttagcgtcggcgcgtatgccaaaggcagcgatccgatgctcgataaagccatcgccctgtggccgcagctggagggctatttgcaacaaggcatttttgaacgcgcggactgggaagcgtctctccaggggctggagcgtattttcccgacagtgtcataacccaggagataacggcagatggcagaacatggtgcgctggcgaccctgaaagatctggcagaaaaagaggtagaggatgccgcgcgcctgctgggtgaaatgcgtcgcggatgtcagcaggcggaagaacagctcaaaatgctgattgattatcagaatgaatatcgcaataacctcaacagcgatatgagtgccgggataaccagcaaccgctggatcaactatcagcagtttatccagacgctggaaaaagccattactcagcatcgccagcaacttaatcagtggacgcagaaagttgacattgccctgaacagttggcgagaaaaaaaacaacgtttgcaggcctggcagacactgcaggaacggcaatccacggcggcactgcttgcagaaaaccgcctcgatcagaaaaagatggatgagttcgcccagcgcgccgccatgaggaaacctgaatgattcgcttagcgcccttgattaccgccgacgttgacaccaccacattgcctggcggcaaagccagcgatgctgcacaagattttctcgcgttgttgagcgaagcattagcaggcgagacaactaccgacaaagcggccccccagttgctggtggcaacagataagcccacgacaaaaggcgagccgctgatcagcgatattgtttccgacgcgcaacaagctaatttactgatccctgtggatgaaacaccgcctgtcatcaacgacgaacaatccacatcaacaccgttaaccaccgctcagacgatggcgttggctgcggtggctgacaaaaatacgacaaaagacgaaaaagcggatgatctgaatgaagacgtcaccgcaagcctgagcgccctttttgcgatgttgccgggttttgacaatacgcccaaagtgactgatgcgccgtcaaccgtgttaccgacagagaaaccaacgctcttcacaaaactgacttctgagcaactcacaacagcacagcctgatgacgcccccggcacaccagctcagccattaacaccgctggtagcagaagcccagagtaaagcggaagtcatcagcacaccttcaccggtgaccgctgccgccagcccgctaatcactccacaccagacacagccactgcccaccgtcgccgcacctgttttgagtgcaccgctgggttctcacgaatggcaacaatcattaagccagcatatttcgctgttcacccgccaggggcaacaaagtgcagagttgcgtctgcacccgcaggatttaggtgaagtgcaaatctccctcaaagtggatgataaccaggcgcaaatccagatggtttcaccgcatcagcatgtacgcgccgccctggaagcagcgctgccggtactgcgcacgcagctggccgaaagtggcattcagttagggcaaagcaacatcagtggcgaaagctttagtggtcagcagcaggccgcttcccagcaacagcaaagccaacgcacagcaaaccatgaacctctggcgggggaagacgacgatacgcttccggttcccgtctctttacaagggcgtgtaacaggcaacagcggcgttgatattttcgcctaacgtcagaggtagcaccgtaatccgcgtcttttccccgctttgttgcgctcaagacgcaggataattagccgataagcagtagcgacacaggaagaccgcaacacatgactgattacgcgataagcaagaaaagcaagcgatcgctttggatcccgattctggtattcattaccctcgcggcctgtgccagcgcaggttacagctactggcattcgcatcaggttgccgctgacgacaaagcgcagcaacgcgtcgtgccctcaccggtcttctacgcgctggataccttcacggtcaatttgggcgatgcggatcgcgtactttatatcggcataaccctgcgcctgaaagatgaagctacccgctcgcggctgagtgagtatttgccggaagtccgtagtcgcttgctgttactgttttcgcgtcaggatgctgccgtactggcgacagaagaaggcaagaaaaacctgattgccgagattaaaaccacactttccaccccgcttgttgccgggcaaccgaaacaggatgtcaccgacgtgctgtataccgcttttattctgcgataacgacatgggcgatagtattctttctcaagctgaaattgatgcgctgttgaatggtgacagcgaagtcaaagacgaaccgacagccagtgttagcggcgaaagtgacattcgtccgtacgatccgaatacccaacgacgggttgtgcgcgaacgtttgcaggcgctggaaatcattaatgagcgctttgcccgccattttcgtatggggctgttcaacctgctgcgtcgtagcccggatataaccgtcggggccatccgcattcagccgtaccatgaatttgcccgcaacctgccggtgccgaccaacctgaaccttatccatctgaaaccgctgcgcggcactgggctggtggtgttctcaccgagtctggtgtttatcgccgtggataacctgtttggcggcgatggacgcttcccgaccaaagtggaaggtcgcgagtttacccataccgaacagcgcgtcatcaaccgcatgttgaaactggcgcttgaaggctatagcgacgcctggaaggcgattaatccgctggaagttgagtacgtgcgttcggaaatgcaggtgaaatttaccaatatcaccacctcgccgaacgacattgtggttaacacgccgttccatgtggagattggcaacctgaccggcgaatttaatatctgcctgccattcagcatgatcgagccgctacgggaattgttggttaacccgccgctggaaaactcgcgtaatgaagatcagaactggcgcgataacctggtgcgccaggtgcagcattcacagctggagctggtcgccaactttgccgatatctcgctacgcctgtcgcagattttaaaactgaaccccggcgacgtcctgccgatagaaaaacccgatcgcatcatcgcccatgttgacggcgtcccggtgctgaccagtcagtatggcaccctcaacggtcagtatgcgttacggatagaacatttgattaacccgattttaaattctctgaacgaggaacagcccaaatgagtgacatgaataatccggccgatgacaacaacggcgcaatggacgatctgtgggctgaagcgttgagcgaacaaaaatcaaccagcagcaaaagcgctgccgagacggtgttccagcaatttggcggtggtgatgtcagcggaacgttgcaggatatcgacctgattatggatattccggtcaagctgaccgtcgagctgggccgtacgcggatgaccatcaaagagctgttgcgtctgacgcaagggtccgtcgtggcgctggacggtctggcgggcgaaccactggatattctgatcaacggttatttaatcgcccagggcgaagtggtggtcgttgccgataaatatggcgtgcggatcaccgatatcattactccgtctgagcgaatgcgccgcctgagccgttagtgatgaataaccacgctactgtgcaatcttccgcgccggtttctgctgcgccactgctgcaggtgagcggcgcactcatcgccattattgccctgatcctcgctgctgcctggctggtaaaacggttgggatttgcccctaaacgcactggcgttaacggtctgaaaattagcgccagtgcttcactgggcgcgcgtgaaagggttgtggtggtcgatgtggaagatgcacggctggtgctcggcgttaccgcaggtcaaatcaatctgctgcataaacttcccccttctgcaccaacggaagagataccgcagaccgattttcagtcggtcatgaaaaatttgcttaagcgtagcgggagatcctgatgcgtcgtttattgtctgtcgcacctgtccttctctggctgattacgcccctcgccttcgcgcaactgccgggtatcaccagccagccgctgcctggcggtggacaaagctggtcgctcccggtgcagacgctggtgttcatcacctcgttgacgtttattccggcaattttactgatgatgaccagtttcacccgcatcatcattgtttttggtttattgcgtaacgcgctgggaacaccctccgcgccacctaaccaggtattgctggggctggcactgtttttgaccttttttattatgtcaccggtgatcgacaaaatttatgtagatgcgtaccagccattcagcgaagagaaaatatcaatgcaggaggcgctggaaaaaggggcgcagccgctgcgtgagtttatgctgcgtcagacccgtgaggcagatttagggttgtttgccagactggcgaataccggcccgttgcagggacctgaagccgtgccgatgcgcattttgctcccggcctacgtgaccagcgagttgaaaaccgcatttcagataggcttcacgattttcatcccttttttgattatcgacctggtgatagccagcgtgttgatggcattggggatgatgatggttcccccagccaccattgctctgccctttaaactgatgctgtttgtactggtggatggctggcaattgctggtcggttcgctggcgcagagcttttacagctagagaggcaaaatgacacctgaatcggtcatgatgatggggactgaagcgatgaaagtcgcgctggcactggctgccccgctattgttggtagcgttggtcacgggccttatcatcagtattttgcaggccgccacgcagattaacgaaatgacgctgtcgtttattccgaaaatcatcgccgtatttatcgccattattattgccggaccgtggatgctcaatctgttgctggattacgtccgcaccttgttcactaacctgccgtatatcatcgggtagccgtactatgttgcaggtgacaagcgaacaatggctatcctggttaaacctgtacttctggccgttactgcgcgtgctggcgctgatctccaccgcgccgattctgagcgaacgcagcgtaccgaaacgggtaaaactgggtctggcaatgatgatcacgttcgccattgccccatcattacctgccaacgatgttcctgttttttcgttctttgctctgtggctggccgtgcagcagatcctgatcggcattgcgcttggttttaccatgcaatttgcctttgccgctgtgcgaaccgctggcgaaattatcggtctgcaaatggggctgtcatttgcgacgtttgtcgatccggccagccatcttaatatgcccgttttagcgcgtatcatggatatgctggcgttactgctgttcctgacatttaacggtcatttatggttgatttcactgctggtcgatacctttcacaccctgccgattggtggcgaaccgttgaacagcaatgcgtttctggcactcaccaaagcagggagtttgattttccttaacgggctgatgctggcgttaccgctcattactctgctgctgacactgaatctggcattaggtttacttaatcgtatggccccgcaattatccatttttgttattggatttccattaactctgactgtcggcatctctttaatggcggcattaatgccgttaattgcacctttttgcgaacatttattcagtgaaatttttaatttgctggctgatattattagtgaattgccattaatataattccgtaacgtttatcatgttatcctaaggattatccgaaaaataatacctacgaacatcttccaggatactcctgcagcgaaatatttgttttaagctcactcacatatcgcaacatttactttactttaagacaattccaggcaaattatacaacactttacgggatagtaagtccgcctgaaaaatcgcgagagtggcgcattaggtgacccatgttgttccgtttagtcatgatgaaatattcaggtaaggggaattatcgttacgcattgagtgagggtatgccatgtcaacgattattatggatttatgtagttacacccgactaggtttaaccgggtatctgttgagtagaggggttaaaaaaagagaaatcaacgacattgaaaccgttgatgaccttgccatagcttgtgattcacagcgcccttcagtggtgtttattaatgaggactgtttcatccacgatgcttctaacagtcagcgtatcaagctcatcattaatcaacatcccaatacgttatttatcgtttttatggcaattgccaatgttcattttgatgaatatctattggtcagaaaaaatttattgatcagttctaaatcgattaaaccggaatctctcgacgatatccttggcgatattctgaaaaaagagacaacgataacctcgtttttaaatatgccgacgttatcattgagccgaaccgaatcgagtatgttgcgaatgtggatggcaggtcagggaaccattcaaatctctgaccaaatgaatatcaaagccaagaccgtttcatcgcataaaggtaatattaaacgtaagatcaaaacgcataataaacaggttatctaccatgtcgtccgactgacggataatgtgactaatggtatttttgtcaacatgcgctaacacattctgactggtggtttcccaccagtcaggctgaataagattactctgctttctccacaaagataccgtcctgatgccctgcttcattaaagaaccagatgccgagcgggtagtcttccagcgaaaccaggtacattgtgccttcactaaactcctcaactgccagtaccacgccaggacgacgcggaccgccatccgttttgactgttacccgatcattcaccttcatcgttttcctcctgtggctttgtgccagtgtagaacaatttcgtttttctggcagcgccaggcgcgcgcgagtgctgattttctcgacggtctatacttaagagatgccaggcggacttaacgactggcggcaacaacagagtaacggttgcgaggaaagatgatgaaaaccgcaaaagagtacagcgataccgcaaaacgtgaggtcagcgtcgatgtcgatgccctgctggcggcgatcaatgaaattagcgaaagcgaagttcatcgcagccagaacgattctgaacacgttagcgtcgatggacgtgaatatcatacatggcgtgaattggcggatgccttcgaactggatattcatgacttcagcgtctctgaagtgaatcgttgaatgcacaataaaaaaatcccgaccctgagggggtcgggatgaaacttgcttaagcaagaagcacttaaaaaattcgttacaccaggaaatctgatgtgttcatcaccttatccgcaatttttttcgctgacaagaaaatattcgccatatgaatgattaacgctacttatgaatagaaatgtgacgcacgtcaccccttggtggctctggcgtcagcgggatcgctcccgaaaaaatcatctttgataatttgtgcggttttgagaatcatcctggtaagaggagtactgcgcgactatgttttcaattcaacaaccactactggtttttagcgatcttgatggcaccctgctggacagtcatagttatgactggcaaccggcagccccctggctcacccgtttacgcgaagcaaatgttcccgtcattctctgtagcagtaaaacatcagcggaaatgctgtacttgcaaaaaacgttggggctacaaggtttaccgctgattgccgaaaatggcgcagtgatccagcttgctgagcaatggcaggagatagacggttttccacgcatcatctcaggtattagccatggcgaaatcagcctggttttaaatacgctacgcgagaaagaacattttaaattcacgacttttgatgatgtcgacgatgcaaccatcgccgaatggacgggattaagccgtagccaggcggcgctgacgcagcttcatgaggcgtcggtaacgctaatctggcgcgacagtgacgagcgtatggcacaatttaccgctcgtctgaacgaactgggcttacagtttatgcagggtgcgcgcttctggcacgtactggatgcttctgccggaaaagatcaggctgccaactggattatcgcgacctatcaacaattgtcaggcaaacgcccaaccacacttggcctgggcgatgggccaaacgatgcgcccttactggaggtaatggattacgcggtgattgtgaaagggctaaatcgtgaaggggtgcatctgcatgatgaggatccggcccgcgtctggcgaacgcagcgtgaaggaccggaaggatggcgtgaagggctggaccattttttctccgcccgttaagcgttatcgctcgcgaatacccgattacgcccagcctgtttagcgagataaagccgacggtcggccagtgactggagttgttcaaaatcataatcaccggtttcctcgctgctgcttacccccagcgaggcactgatgcgtatcgtcgtactcttggcgatcaacatctctttttcatttaatttcagtcgaatacgttctgcgacctccgcagcctccgtcagactcgcgcctggcagaatcacacaaaactcctcaccaccgacccgcccggcaacgtcctgcgcacgcaaggaactgctaattaatccggcagcatgagaaagaacacggtcgcccgcctgatgaccaaagcggtcattaatcgctttaaaatggtcaagatcgacctgaatgacagaaaaaggatgttggtgcgtctgacacaatttagcgagcggacgggctttttcgaacagtgcgccacggttatataaacgcgttaaggtgtcgtgccacgcctgccactgcaacgagctttgcagaacatacatgttgctaaccatccggcgaatcacataccaggagatgagtaacatggtggtaaagagcgcccacagcagggttaatgcaatgctgatactgccgaaatcgccgcgcacgccttcgcttaacgtatggacacgcaccagcacaccgtcgaaatggtccagacgttcccagctaacatagcgactgtccatacgaatgccgccccgcgtgtcatgttccattgcctgcgccagcaaggccagttcacgaggatcaaaaatattccctgttggatggtcaggattggaagaggtcaaaaatctcagcttactgtcatagagctgatactcaccatcgaggtttttatcgatggcgtttcttaaaaattgctgcatagtacgcacgggaatactcatccccagcacgccataccagtagttattactgtctaccggaacactgacggtaacctgcggttcagtattgctggcgtgttccggttgcgaagtgaaccagcgtaccgcgcggtgacgattttctcgttgtgaatggccaataaaccagggttgggtgacatagccgtaataacgcgttggaacattgcgcgtaaacaaggtcggctgcgtcgaaacgtaaaatccggcacgcgagacatacatcgcctgttcaaccatcgacgaggagttgtgcgctagtcgcagcaagtaaccaacttccagtgcagcggtaatttcattgtcgaggctttcattttcgcgagacaggagattcccctcgctgactaatgcatccgacacaccattaactggcagagtgcgtcgtcggttgagttcgattttccaggcgtgctcgtcgcgatgctgttcgaactcggttacagcatcacgcagagaggtgaaatccagtggcgctacgagagcttcgcgcatgccattacgtaaaaagatcagtttgtcgacgttatactgcaaatgcttatcgagcgcgttggcaacgttttccagatgattacgctggctggagatataggcatcttccagcaccaccacttcacgccaggtgagcaaggtggaaaaaagcaataccacgataaagcagagattaacgacatgaccaggccccaggcggcgtgcgagttttttcaaccagctctggttttccatttttgtctcgtgctgcaccctgacgactcccaacctgcttttttatgattctggcataacctggcgatagcgtaccgcaaaacagcgataattttataatggtggcatgataagacgcgactatcattcattgcaggcattagcacaccaggccggatgtgatccggcctgatgttaatgataccctttcacacttcttccgcagaacgactcccctcccccggaacaagctcggtttcatgaaaagcttcccgcttgaccccgtaaccgtcataccaacgacactcaaccataccgctggagtatccagtgacaatcatccgcgggccgccctctttaaccgtaacttcctcactaaccataaagctcatactcgcctccttttttcgagtgaaacttgttcaccttagttgaagatggcgaattttgcataatagccagtgcgagtattaatgtgcctgaccgcgcattttctctacggctttcactcccagcaccacgatgccgccgatgataaatccaagaatcagatttaaaacagtcggtaatatcatcgccactactgcactttgctgcccggcgaaatgttcaatggcgtgatgcagcggcgcaattccatgtaccacaatcccaccgccgacgaggaacatcgccagcgtgccgacaatcgataacgctttcatcagccagggcgcgataatcaataaccctttacctaatgcctgcatcagcgcgctggatttttccgccagccaataccccaggtcatcaatcttaacgataacccctaccagaccgtagacgcccacggtcactaccagcgcgatgcctgaaagcaccagcacctgattaagcaacggcgcttcggccacaatccccagcgtgatggcgacgatttccgcagacaatataaaatcggtacgaatcgccccttttattttgtccttttcaaacttcagcggatcctgcgccgccagcttctccagacgctgctggctctgcgccggatcttctttatgtttacgcgcctccagcatatgcagcactttctctactccttcaaagcagagaaacgcgccaccaatcatcaacagaggcgtaatcgcccacgggataaacgcactgatgatcagcgccagcggcaccagaatcactttattaatcagcgatcctttcgccacgccccagaccacgggaagttcccggttggcccgcacgcctgaaacttgttgcgcattgagcgataagtcatcccctaatacaccggcggttttcttcgccgccagtttgcccatcacggagatatcgtccagtagtgtggcgatatcatcgagcaacgtcagtaaactactcccggccaaaagcattccctctcatttttattgttgaagggtgtaagtatgaagcaaaaacggcagctctgatacttgcttcacaggtcaacatttttttaacaatcaagtgcaattatatctctcgccagcagaatgattttcacgtttactatgaaccacctttttatttccaccgtgagggattatgcgtttccgccagttgttaccgctttttggcgcgctgtttgcgttgtatatcatttggggctcaacctattttgtcattcggattggcgtggaaagctggcctccgttaatgatggcgggcgttcgattcctggcagccggtattttattgctggcatttttgctactgcgcggacacaaactccccccgctacgtccgctgctcaatgccgcgctgattggcctgttattgctggctgtcggtaatggcatggtgacggttgccgaacatcaaaatgttccttccggcatcgccgccgtagtggttgcaaccgtgcccctctttaccctgtgcttcagccgcctgtttggcattaaaacgcgcaaactggaatgggtgggtattgccattgggcttgccggaatcatcatgctcaatagcggtggaaatttaagcggcaatccgtggggcgcgattctgattttaatcggctcgattagctgggcgtttggctcagtttatggctcgcgcattaccttacctgtagggatgatggcgggtgcgattgagatgctggcggcaggcgtggtgttaatgatcgcgtcgatgattgcgggtgaaaaactgacggcgctcccttccctttcaggcttccttgcggtcggctatctggcgctgtttggttcgattatcgccatcaacgcttatatgtatttaatccgtaatgtcagtccggctctcgccaccagctacgcttacgttaacccggtggtcgcggtcttgctgggtacgggactgggtggagaaacactgtcgaagattgaatggctggcgctcggcgtaattgtcttcgcggtggtactggtcacgttgggaaaatatctcttcccggcaaaacccgtagttgcgccagttattcaggacgcatcaagcgagtaaatgaatcccctgcgtgtcgatctgcgcgctggcaccttcgccgcagatccactcttccagacgctcggtaagcgcttcatccgtcagcttctcgcgcccacgtaacgcgcactcccagacaatcaatacgcgccagccgagttcctgcaagcgactgatatcgcggcgatcgcgctcaacatttttacctatcttctccagccagaactcggttcgagtcgcaggcactttaaacagatagcagtgatgatgatgccagaagcagccatgggtaaatatcacgcagcgatattcatcaacgacaaaatccggacgtccgggcagactggcgtcctgaacgcgaaatgccaggccctgcccggttaacagactggcgaggcgcttctctatcgccgtatcacgcgtggcaatcgcgcgcatatttttgctgcgagtggccttatcgtgaacgtcggccatgttgtgcctcttgctgacgcaacgccaccgcctgtttgatttttggctcaagcagttttgccaccgcggcaaagaccggcacgaccaccgagttaccgaactggcgataggcctgagtgtccgaaaccggaatacggaatttcgcttctcccggcgcttcaaaacccattaagcgcgcgcattcccgaggcgttaaccgacgtggacgatgttgctgattcagcggatcgtcaaagtctttctcacccgtggccatatcccagccgcgatcgattaaaatttccgcgccatctttgtaataacgcgcagacagcgtacgcgtgacgctttgcggattgttcggataaaccattccataaccgaagccgttaccgcgcgcctgatgttttttcgcatatcgatagaggtacttccacagcaccggcgtcaggatatatttcgcctcgaccatcgggtccaacagctgcgccagcgtcactcgctgcgcagggaaacattcgctgatatcacgcagggtaaaatcggctttcagattcagatcgcgacgaaaacccaccagcacgatgcgttcacggtgctgcggcagaaaatgtttgccgtcgatgattttcggatcgtctggcccattatcttctgcatcagccacgtcatagcccagttcgtccagcgtctgcatgatgatgcggaacgttttaccctggtcgtgacttttcaggtttttgacgttttcgagcacaaacatcgccggacgacgcgcgtcgataatgcgtaccacatcaaaaaacagcgtgccctgggtatcgcaggcaaaaccgtgcgcccgcccgagcgagttctttttcgatacgccagccagcgaaaatggctgacaagggaaaccggccagtaaaacatcgtgttcaggaatgtgttgacgaatatgttccgccgccgcctcatcactcacgccttctttatggctgagggtgatgtcgcggatatcttcattaaaatgatgcgtcgccggatcgcaataatggttggctttataagtgcgtaccgcatgtttgttccattcgctggtaaacacgcactgtccgccaatcgattcaaaaccgcgacggatgccgccaattccggcgaatagatcgataaagcgaaacgcataatgcggatgatgtgccggtggtttgggtaataacgtttgcagatgggcgaactctttctcacttaaacggtgccatgccgagtcattcgccagcgcacgttttaaaattgccgcgctccagtgattctcacctacaccattaagctgcgccaccaacgttttaacatcataaatttgcagcagtttctccagcattgcctgtgcggcattcccggtgctgtatgaatcggttactgatatattttcctgcatagatttcaccggccatctgagatggccgacaggttaacataattacagccatttagggccacgcgctcagccagcggatgaaaacgcatctatcaccttgtgatcgacaccttcattctcccccgccagttcggcactgagcttcgccataaactcgactaaaaaatgcgcgttgtgctgcgccagctgcttgcctcttgcggtttgcatggtttgcggtagcttcagcaacttagtctggaaatgatccagcgcgtagcgtttatcatcaagcgggcgatgctgtgcgaacggatcttcaccatcaaacagcgccacgcccaatgcccctgaaacggcaaacacgcgcgccaggccaatcgcccccagggcttccagccgatccgcatcctggacaattttagcttccgttgttaagggggcgatttgcgcgctgaaactgtgagcggcaatggcatgacaaacggcctcgattttctccgccggaaattgctcgaactcttcacggagcaggcgacgcgtctcttctgccgccaggattgaagaacgctgcctttgcggatgatttttcgccaggctcacaatatcgtgaaaataacaggcggttaaaatcaccagcatatcgacatcgtcatctgccgccagcttctgtgccgtagcccagacgcggcgaaaatgacacacgtcatgggccgcgtcctggtgctgatgatggtttttcaaccagttttcgaactgtgcctgccagtgttgtaagtccatacgcgctccgttgccaaagagtcgccaccttagcagtttttattcatagcgtctgctacgtgcgggacgaggtcgggtgtaccaggcaatgctgcctaacaatgccccgaccagagccataaataaaaatccgaccagtgcccctaaccactttcccgcggtagagcctaaatcgctttcaaatcccgacacgggggcatcgggaatccggctcatcacccagatgtaacgcgccattgcccagacgaaatagccacaccatgtatagaaagcccacaaagccagtttgccgccagggctgcgagagagtctctcttccatctttgtcgaaccgtattccattttgagataacccggaaaattcagacttagtactattatgtgataaaagtcacatttttccacattggatgagccagtcaagactcaatcattttttgaacaaatagataaattttgcgcaacggcagtgaatacaggaaaaatcgttttgagcgattttatttatctttgatatcggctttattaattcatttaatcaatatattagcactgattacaattatacctttttattattctgtgtcatgatgcttccgttattagccttttatcgtcttgtttatattttttgggccggcatgatgccggcttttttttatgccttcattaatgtgcgcctgatcacaccagccgtttggcgcaacaatcattgataccccctatgtttccgctcaactcataacatattgatatacatttataattttcatgaatatttatatttagaattcataattatgaattatattaaatagattagaaacattttgatatcttttaaatacatttgttacatgtaatccttaaaataaaatgaacttcatagaatagtatccaaatgtgcttttttttggataacggcacttattgatatattcatgaagattataatcacaagggaatacataatgaaaagaaaagttctggcaatgctggtcccggcgttattagttgctggcgcagcaaatgcggctgaagtctataataaagatggtaataaactggatttgtacggaaaagtagtgggtctgcactacttctctgatgattctggcagcgatggcgacatgtcatatgcccgtatcggtttcaaaggtgaaactcagatcgctgatcaattcactggttatggtcagtgggaatttaacattggcgcaaacggtcctgaaagcgacaagggtaataccgcaacgcgtctggcatttgcaggtttaggctttggtcagaatggtactttcgactatggtcgtaactacggtgtcgtatatgacgtagaagcatggaccgatatgctgccagaatttggtggcgatacctatgctggcgctgacaacttcatgaacggtcgtgctaatggtgttgcaacctaccgtaacaatggcttctttggttaggtcgatggcttgaactttgctttgcaatatcagggtaataatgaaagtggtggaccattcgggcaggaaggttccggtagtggtgatggccgtagcctttccaaagaaaatggtgatggtttcggtatgtcaacatcctacgacttcgacttcggtttaagtctgggtgctgcatatcaaactctgatcgttcagatcgtcaggttggagttggtttaaatgatcgtaaccatagcaacagaaatgctggtggtgaaaccgctgaagcatggactgttggtgcaaaatatgatgctaataatgtgtatttagcagctatgtacgctgaaactcgcaatatgaccccatatggtggtggcgagtttgataatggtgaatcaagatcagccatcgctaacaaaacccaaaactttgaagttgttgctcagtatcagttcgactttggcctgcgcccgtccatcgcttacctgcaatctaaaggtaaggatttaggcggttgggctcatgacggcaacggcgacccacgttacaccaataaagatctggttaaatacgttgatattggtgcgacctactacttcaacaaaaacatgtccacctatgttgattacaaaatcaacctgctggacaacgacgatgacttctacgaagcaaacggcatcgctaccgatgatatcgttgctgtgggcttagtctaccagttctaatcagtcaactcgctgcggcgtgttactgtaaaactgaacactagcctgagttcgtccctcatcgaactcaggcttttttattggcatttcatctccatctgcggcacacgcaattgccgaagcatatcgatacagcaccttaccctgcccctcctggcacaataacatcaaccagctactcttcaagctaacacccaaatgcatttctttatgaattaatccgtaacaaacacgcttcccatatagaaatatttgcaaaaatagtgcatgaaataagctttttctctaccaatccgggatataaatattcatcagcaccacaatattccacagcactaaatctctccccgccaccccgtacctctgataatggtctaaaatcattgaagccacttgcgacgacgttgctcaataaggaaaatttggcgtgaataatattcaacaccagtgcagcatcatcattacatacttacagccgccgactaccgctttcgatatattgactcaattttccagcctggttaaaaatagcgaccagctcagtcgcaaatatagtgactaccctaactaagcaacaataaggaatacactatgactgttcaaacaagtaaaaatccgcaggtcgatattgctgaagataatgcattcttcccttcagaatattcgcttagccaatataccagtcctgtctctgatcttgatggcgtggactatccaaaaccttatcgcggtaaacataaaattctggtgatcgccgcggacgaacgttatttgccgaccgataacggaaaactgttctcgaccggtaaccatccgattgaaacgttgctgccgttgtatcatctccatgctgcaggtttcgaattcgaagtggcgaccatttccggtctgatgaccaagtttgaatactgggctatgccgcacaaagatgaaaaagtaatgccattctttgagcagcataaatcgttgttccgcaatccgaagaaactcgcggatgttgttgccagcctcaacgctgatagcgaatatgcagcaatctttgttcctggtggtcatggcgcacttattggtttacctgaaagccaggacgtggctgccgctttacagtgggcaatcaaaaatgaccgttttgttatctccctttgccacggcccggcggcttttctggcgcttcgccacggcgataacccactgaatggttattccatttgcgcattcccagacgccgcagacaaacaaacgccagagattggctatatgccgggtcatctcacctggtacttcggcgaagaactgaagaaaatgggcatgaatatcattaatgacgacatcaccgggcgagtacataaggaccgtaaacttctcaccggcgacagtccttttgcagcgaatgcgttgggtaaactggcggcgcaggaaatgctggcagcttacgcgggttaatccctgttacgtttgaatgtaagcgcataatcaatcgcggccgcgttagtactcacgacgtggctgcgttttttcacggttaatttatggcgtactgaagccctatgttaatttctttgcggtaacgtaatccggaacacattatgcttattgagatagtgatacgtagcacttcccccatgcaattcggcaatcgctttgactaaagaaaggcctagtccctgacctacggaatgacgcgaattatctccccgccaaaatctacggaagagtttttcaggctcattaattttcgttccagggctggcgatatcaatattaagatagctgttggtatcaagaaaactggttatatgaatacgcgatttttctggcgaatatctaatggcattaacaataagattcgataacattcgttgtagtaaaattttatccgcaaagatttgctgattgcactcgaccttaaagcaaatctctttctcgtctgaaaggtattcaagatagtccaacaaattttcgacttccttattgagagaaagcgagtccagtttcaccaaaacattgtttttatctgccctggcaagaaacagtatgttctctgttaaccgcgaaatattttccagctcttcaatgtttccggcaattgttttttgatattcagcgatacttctggtttgactgagcgtaacctgattctgacccagtaatgcattaattggcgttctaagttcatgagcgagatcgtcagcaaactgacttagacgctcaaaatctttgactaaagcatgatgcattttattcaacgcctgcccaagaggttttagttctctcggtaatgcgctaacctcaacaggctctcggctatcgttataattcagcgcttccgttacaccactcaactttttgatctctcgtaatcccgttctgattaacagcggacttaatactgagcaaagtacaatggcgacaatgcaaattataatgctattaattttatactgttcaagcatgttatgtctggctgaagccaatttagccacagtaaccgttaatgatggcgaaacttcatcaatattaattcgtaaagcatctatctctgtatcattaataatgcttctgtaaatgccagctgcgctgattgtctcactagcaggtatgttatttaacatgccatcactgacatttgtccggttaacaattttattgatgctatcaccatgaataatcaagatatcctgactaacatccatcatccggttaaagtacacaggtaacgtatctggatttaccccatcaattaacaactgcttgatctgcgctgtccggttaatgagtgttgtatcatcgcgccatttcaactcacttgccaggccattatagagagtccagacaattccggcgccagcaacagacagtagcaatataaaaagcaaggttaaacggacggttatagatagtcttttcattatttttttaccgctacgaatgaatagcccatcccccggattgtggcaattagcttttcaggaaaaggatcatcaacttttgcgcggagcctgcgaatggcgacgtccaccgtattggtatcactatcaaagttgattccccaaatttcactcgcaataaccgttctgggtataatttcgccagctctggaggccagtagccaaagtaactgaaactccttgcgcgtcagtgtaatactgatattgtccctgctcacactatgactaacagagtccattcttaagccgctgatttctaatgttgaattcaaagcgtgatgttgccttaattgtgcccgaacccttgccagcaactcagaaaatgaaaaaggttttaccagataatcatttgccccactgtccagccctctgactctgtcatcgacagaatcccttgcagtaaggcaaataacaggggtttgctttgctgttcttaacgtttgtaagatctgccagccatccatacccggaagcataatatccagaatgatcaatgcataatcatccttcagcgcaagataaagcccatctctgccatcagaaacggcatcgatgacataacccgcttcggaaagcccctgcgttacccattcctgggtcctttgattatcttcaataagtagaatcttcatgaaaataatatgccataaatcatatgttatagaaacagcctggttcattacaaaattgtaatgctgctgtaaggttaccctggacgctttttcgctatcctcaaaactcattcacatgacaaggatataaacatgttaaagcgttatttagtactctcggtagcaacggcagcattttcattaccttctttggttaatgccgcacaacaaaacattcttagcgtgcacattttgaaccagcaaacaggaaaacccgctgctgacgtgacagtcactcttgaaaagaaggcggataacggctggttacaacttaataccgccaaaacagataaggatggacgaattaaggcactgtggcccgagcaaactgcaactacgggcgattaccgtgtcgtatttaaaaccggggactatttcaagaaacaaaatcttgaaagtttcttccctgagatccccgttgaatttcatattaataaagtgaacgagcattatcatgtgcctttattacttagccaatatgggtattcaacctatcgtggcagttaatgcataaatatgtaaaagcagatctctgctactgttagggaggacactccctgacagattaacagtaaacggctcttgctggctaacgacaaaaaagtgtgatggcttatgaaaaagaatcaatttttaaaagaatcagatgttacggccgagtcggtattctttatgaagcgtcggcaggtgttaaaagcactgggcatcagtgcaactgcactttctttgcctcacgctgcgcatgccgatctgcttagctggtttaaagggaacgatcgcccgcccgcccccgccggaaaagcgctggagttcagcaagcctgccgcctggcaaaataacctgccactgacgccagcagataaagtttccggttataataacttctatgaattcgggctggataaagccgatcccgccgctaatgctggtagcctgaaaaccgatccatggacactgaaaatcagcggcgaagtggcaaaaccattgaccctcgatcatgatgacttaacccgtcgcttcccgctggaagagcgtatttatcgtatgcgctgcgtggaagcgtggtcgatggtggtgccgtggattggttttccgctgcacaaattgctggcgcttgccgaacctaccagcaatgcgaagtatgtcgctttcgaaacaatttatgcaccggaacagatgccaggccagcaggaccgctttatcggcggtgggctgaaatatccttatgtcgaaggattgcgtctcgacgaagcaatgcatccgctcacactgatgaccgtaggtgtttatggcaaggcgttaccgccacaaaatggcgcgccggtgcgactgattgtgccgtggaaatatggctttaaagggattaaatcgatagtcagtattaagctgacccgcgagcgtccgccaaccacctggaatctggcagcgcctgacgaatacggtttttacgccaacgttaatccgtatgttgatcacccgcgctggtcacaggctaccgaacgatttattggttcaggcggcatcctcgatgtacagcgccagccaacgctactgtttaatggttacgccgaccaggtggcatcgctgtatcgtggcctggatttgcgggagaatttctaaatgcgtctgacagcaaaacaggtgacatggctgaaagtttgcctgcatcttgccggattgttgccgtttctctggctggtctgggcgatcaatcacggtggactgggtgccgatccggtgaaagatattcagcattttactggtcgcactgcactgaaatttttgctggcgaccttgttaatcacccctctggcacgctacgcaaaacagccgttattgatacgcactcgccgcctgttaggattatggtgctttgcctgggcgacactgcatttaacaagttacgcattgctggagctgggcgtgaataatctggcgttattaggtaaggagttaattacccggccttatttaacgttaggtattatcagctgggtaattttgcttgctttagcgttcacttcaacccaggcgatgcagcgaaaactcggcaagcactggcaacagttgcataatttcgtctatcttgtcgcgattctggccccaatacattatctgtggtccgtgaagattatttcaccgcagccgctcatctacgctgggctggctgtactgcttttagccttacggtataagaagttgcgttccctttttaaccggttacgcaagcaggttcacaacaaattatctgtataacttcatattgccgacaaagtacgcgttatccctgccggatgtggcgcgagcgccctatccggcatacacagatcgcatcaggttatgtttcgtttgtcatcaacctcaaatcaccaaaataatttattttatttcaataagatagataagtagaactgagaaagccatgctctcgtttcctaagagttgttgcattttgctatatgttacaatataacattacacatcatatacattaactctggaggaaactgttttggcgattcgtctttacaaactggctgttgctttaggtgtctttattgttagcgctcctgccttttcgcatggtcatcactcacacggcaaacccttaacagaggtcgaacaaaaagctgctaatggtgtttttgatgatgccaatgtacaaaaccgaacgctcagtgactgggatggagtctggcaatccgtttatcctttactgcaaagtggcaaacttgaccccgtctttcagaagaaagcggatgcagataaaactaaaacatttgctgaaattaaagattattatcacaaaggttatgcaacagatatcgagatgattggcattgaggacggcattgttgaattccatagaaataatgaaacaacatcgtgtaaatatgattacgatggatacaaaatactcacctataaatcaggcaagaaaggcgttcgttacttattcgaatgtaaagatcctgaaagcaaagcccctaaatatatacaatttagcgatcatataattgcaccacgaaaatcatctcattttcacatttttatgggtaatgattcacagcaatctttattaaatgaaatggaaaactggccaacgtattatccatatcagttgagtagcgaagaagtggtcgaggaaatgatgtctcattgagtattctcatgataacgcctcgatgccgctttagtaagttatcataactgccactggtccatccacaaacgccactgaacgcaagctagctacagacacgctcatcactatgacgtgtctgtatattaataagctaacccgcattgagttaaccaataacggattccatacacaatacggccaacagagaaagatacctgtgctcacgccattgcttatattggctggttacaatatgcactatcaattttttaaataacaaattattaaaaccacatctgtataaggaatttttaaggttcgtgggatagcttgactgtgaaaatcacaggagctacaaaaatgaaccgattctcaaaaactcaaatttatttacattggataacgctgcttttcgttgcaataacctatgccgcgatggaactccgtggctggtttcctaaaggtagtagtacttatctgctgatgcgagaaacacattacaatgcgggtatattcgtttgggtgttaatgttttcacgcctgattataaaacaccgttatagtgatccttctattgtgccaccgccacctgcctggcaaatgaaagcggcttcgctaatgcacatcatgctttatataaccttccttgcacttcctctgctggggattgctttgatggcttacagtggaaaatcgtggagtttccttggtttcaatgtgtctccctttgttaccccaaacagcgaaattaaagcactgataaaaaatattcacgaaacctgggcaaatataggctactttttaatcgcagctcacgctggcgcagcactctttcatcactacattcagaaagataatactctgttacgaatgatgcctcgccgcaaataagtcgatccccttacaaggaaatgtgaaccatggacatcaacgcgtcataaatgtttacgcaagtgcacaatgcaccctttccactatcaacaaggaggagcagaaactgtgtaaatcgtacaatggtaagacttatcaaaaatacaggttaattttggtatttaaaccttttttacttgttagtatgatacaaaggctttcaaaaaagctgcgaaattcaacaactcttggaaattatggactttgtcccgcggctttaatctgacggccgcgttccttttttgactcaattattgaacccttctctacgcaacttcagttcccaccaccaactttgcggcagtttcataggatgaatgtctaaaagaataatggtgagcgataagaaaacgactgaataactgcacattttcgctcgaaagcttcctgtcagatccatagcgaatcaagtgctgaatgtcacagtatcgaacagaaaacagtgacgatctaacccttcaagaatattctacgattgttctgtttaggaaaagcaaggcgggaagtcgggagataagtcattgataaagtggcggagagagggggatttgaacccccggtagagttgcccctactccggttttcgagaccggtccgttcagccgctccggcatctctccgttcagatggttgccatgatgccaggaaatttggcattttaacagtccctgtccgtgcaattttgttcaagtgacgagtttgcgagcaaaacgatgattaagtggccctggaaagtacaagaatcagcacatcaaactgcccttccctggcaggaagcactatcgatcccccttttaacgtgtctgacggaacaggaacaaagcaaattagtcactcttgccgaacgttttttacagcaaaagcggcttgttcctttacagggctttgaactggattcattaagaagctgccggatagcacttctattttgcctacccgttctggagttaggactggaatggctggatggttttcatgaagtcttaatttatcctgcgccatttgtggtcgatgatgaatgggaagacgatatcggtctggtgcataaccaacgtattgttcagtcaggtcagagctggcagcaagggcctatcgttttgaactggttggatatacaagattcttttgatgcttctggttttaacctgattattcatgaagtcgctcataagctggacacccgtaacggcgatcgcgccagcggagttccctttattccgttgcgtgaggttgctggctgggaacacgatcttcatgctgcaatgaacaacattcaggaagaaatcgaattggttggcgagaatgcggcgagcattgatgcttatgcagccagcgatcctgctgaatgttttgccgtactttctgaatatttctttagcgccccagaactttttgctcctcgtttcccttcattgtggcaacgtttctgccaattttatcaacaagatcctttgcagagactgcatcacgctaatgatacagactcgttttcggcgacgaatgttcattaattaacaactttgcagattaattaaccaattgaaatgacttatgaaatttagtgttgacagacaaggtaccgctaagtaatattcgccccgttcacacgattcctctgtagttcagtcggtagaacggcggactgttaatccgtatgtcactggttcgagtccagtcagaggagccaaattctaaaaattcgcttttttagcgcaatgtcactgaccttagttgaacattgttttttaacggatagcgggtttttaacatcttaagcgccctcgacctttatggttgagggcgttttgctatgaacgccatcaccattttcccctcgattataaaacttgagttattcagtagtctcccctcttgcaactcacacccaaaactgcctaacgaaaagttattaattttcaatcatattgctatcagtatttacattttttcgctgtgctagaaagggcgcatttatgttagctcgttcagggaaggtaagcatggctacgaagaagagaagtggagaagaaataaatgaccgacaaatattatgcgggatgggaattaaactacgccgcttaactgcgggtatctgtctgataactcaacttgcgttccctatggctgcggcagcacaaggtgtggtaaacgccgcaacccaacaaccagttcctgcacaaattgccattgcaaatgccaatacggtgccctacacccttggagcgttggaatcggcccaaagcgttgccgaacgtttcggtatttcggtggctgagttacgcaaactcaaccagtttcgtacgtttgctcgaggttttgataatgtccgccagggtgatgaactggatgtcccggcacaagttagtgaaaaaaaattaaccccgccgccgggtaatagcagtgacaacctcgagcaacagatagccagtacttcacagcaaatcgggtctctgctcgccgaagatatgaacagcgagcaagcggcaaatatggcgcgtggatgggcctcttctcaggcttcaggcgcaatgacagactggttaagccgcttcggtaccgcaagaatcacgctgggcgtggatgaagattttagcctgaagaactcccagttcgattttctccatccgtggtatgaaacgcctgataatctctttttcagtcagcatactctccatcgtactgacgagcgtacgcagattaacaacggcttaggttggcgtcatttcactcccacatggatgtcgggcatcaacttctttttcgaccacgatcttagccgttaccactcccgcgccggcattggcgcggagtactggcgcgactatctaaaattaagcagtaacggctatttgcgactgaccaactggcgcagcgcacctgaactggacaacgattatgaagcacgcccggccaatggctgggatgtacgcgcagaaagctggctacccgcctggccgcaccttggcggtaaactggtctatgaacagtattatggcgatgaagtggccctgttcgataaagacgatcggcaaagtaatcctcatgccataaccgctggacttaactatacccccttcccgctgatgaccttcagcgcggagcaacgccagggtaaacagggcgaaaatgacacccgttttgccgtcgattttacctggcaacctggcagcgcaatgcagaaacagcttgacccgaatgaagtcgctgcacggcgtagccttgcaggcagccgttatgatctggtggatcgcaacaacaatatcgttctggaatatcgcaaaaaagaactggttcgcctgaccctgacagaccccgtgacagggaagtcaggagaagtgaaatcactggtttcgtcgctacaaaccaaatatgccctgaaaggctataacgtcgaagccaccgcactggaagctgccggtggcaaagtggtcacaacgggtaaagatattctggttaccctgccggcttaccggttcaccagtacgccagaaaccgataacacctggccgattgaagtcaccgccgaagatgtcaaaggcaatttgtcgaatcgtgaacagagcatggtggtcgttcaggcacctacgctaagccagaaagattcctcggtatcgttaagtacccaaacattgaacgcggattcccattcaaccgccacactgacttttattgcgcatgatgcagcaggtaatcctgttgtcgggctggtgctctcgacgcgtcacgaaggtgttcaggacatcaccctttctgactggaaagataatggtgacggaagctatacccagatcctgaccacaggagcgatgtctggcacgctgacgctgatgccacagctgaatggtgtggatgcggctaaagcccccgccgtggtgaatatcatttctgtttcgtcatcccgaactcactcgtcaattaagattgataaggaccgttatctctccggcaatcctatcgaggtgacggtagaactgagagatgaaaatgacaaacctgttaaggaacaaaaacagcaactgaataacgcagtcagcatcgacaacgtgaaaccaggagtcactacagactggaaagaaaccgcagatggcgtctataaggcgacctataccgcctataccaaaggcagtggacttactgcgaagctattaatgcaaaactggaatgaagatttgcataccgctggatttatcatcgacgccaacccgcagtcagcgaaaattgcgacattatctgccagcaataatggtgtgctcgccaatgagaatgcagcaaacaccgtctcggtcaatgtcgctgatgaaggaagcaacccaatcaatgatcataccgtcacgtttgcggtattaagcggatcggcaacttccttcaacaatcaaaacaccgcaaaaacggatgttaatggtctggcgacttttgatctgaaaagtagtaagcaggaagacaacacggttgaagtcacccttgaaaatggcgtgaaacaaacgttaatcgtcagttttgtcggcgactcgagtactgcgcaggttgatctgcagaagtcgaaaaatgaagtggttgctgacggcaatgacagcgtcacaatgaccgcgaccgtccgggatgcaaaaggcaacctgctcaatgacgtcatggtcactttcaatgttaattcagcagaggcgaaactgagccaaaccgaagtgaatagccacgacgggatcgccacagctacgctgaccagtttgaaaaatggtgattatagggttacggcctctgtgagctctggttcccaggctaatcaacaggtgaattttatcggtgatcaaagtactgctgccctgaccctcagtgtgccttcaggtgatatcaccgtcaccaacacagctccgcaatatatgactgcaaccttgcaggataaaaatggcaacccactaaaagataaagaaatcaccttctctgtgccaaacgacgtcgcaagtaagttctcgattagcaacggaggaaaaggcatgacggatagtaacggggttgcaatcgcctccctgaccggcacgttagcgggcacgcatatgatcatggctcgtctggctaacagcaatgtcagcgatgcacagccaatgacgtttgtggcggataaagacagagcggttgtcgttttgcaaacatcgaaagcggaaatcattgggaatggcgtggatgagacaactctgacagcaacagtgaaagatccgtcgaatcatccggtggcggggataacggtaaacttcaccatgccacaggacgttgcggcaaactttacccttgaaaataacggtattgccatcactcaggccaatggggaagcgcatgtcacgctgaaaggtaaaaaagcgggcacgcatacggttaccgcaacgctgggtaataacaataccagtgattcgcagccggtaacatttgtggcggacaaagcctcggctcaggttgtcctgcagatatcaaaagatgagatcacaggtaatggcgtcgatagcgcaacgctaactgcaacggttaaagatcagttcgacaatgaggtgaataatcttccggtaacattcagctcagcctcttcaggactcaccctgaccccgggagtaagtaataccaacgagtctggcatcgcgcaggccactctcgcaggcgttgcctttggtgagaagacggttactgcatcactggctaataatggtgccagcgacaacaaaactgtgcattttattggcgacacagcggcggcaaaaattatcgagttggcgcctgtcccagacagcataatcgccggtaccccgcagaacagctccggcagcgtcatcaccgccacagtcgttgataataatggctttccggtgaaaggtgtgactgtgaacttcaccagcaacgcagcgacagccgaaatgacgaacggcggtcaagccgtgacgaacgaacagggtaaggctaccgtcacttataccaatacccgctcctcgatagaatcaggagcgagaccggataccgttgaggccagtctggaaaatggtagctccacgcttagcacatcaattaatgtcaacgctgatgcgtctacggcacatctcaccttgctacaggcactttttgatacagtctccgcaggcgagacaaccagtctgtatattgaggtgaaggataattacggcaacggtgtcccccagcaggaggtaaccctcagcgtttcaccaagtgaaggcgtgacccccagtaataacgctatatatactaccaaccacgacggcaatttttacgcaagctttaccgctacaaaagccggggtttatcaattgacggcaaccctcgaaaatggcgattcgatgcaacaaacagtgacctatgtgccgaacgtcgcgaatgctgaaatcacgctggcagcctcgaaggatccggtgattgccgacaataacgatctcacgacactaacagcaacagtcgctgatacagagggcaatgcgatagccaacactgaggtaacatttactctgccggaagatgtgaaggcgaacttcacgctgagcgatggcggtaaagtgattactgatgctgaaggcaaagcgaaagtcacgctgaaaggtacaaaagcaggcgctcatactgttacagcatcgatgactggcggtaagagtgagcagttggtggtgaactttattgcggatacgctcactgcgcaggttaatcttaacgttaccgaggacaattttatcgctaataacgtcgggatgaccaggctgcaggcaacagtgactgatggaaacggcaacccgttagccaatgaggcggtgacattcacgctaccggcagatgtgagcgcaagctttactctcggacaaggcggttccgccattactgatatcaacggcaaggctgaagttacactgagcggtacaaaatccggcacctaccccgtgacagttagcgtgaacaattatggtgtcagtgatacgaaacaggtgactttgattgccgatgctggtaccgcaaaactagcctccttaacctctgtatactcattcgtcgtcagcacgaccgagggcgcaaccatgacggcaagcgtcactgacgctaacggcaacccggtagaaggcataaaagttaatttccgcggaacctccgtcacgctaagcagcaccagcgttgaaacggatgatcggggtttcgctgaaattcttgtgacaagcaccgaggtcggactgaaaacagtttcagcctctctggcagataaacctactgaagtcatctcgcgattactgaatgccagtgcagatgttaattctgcgacgattaccagtctggagataccggaaggtcaggtaatggtcgcacaagacgtagcagttaaagctcacgttaacgaccagtttggcaacccggttgcgcatcaacccgtgacattcagtgcagagccatcctcgcaaatgatcatcagccagaatacggtctctactaatacgcagggtgtagccgaggtcaccatgacgcccgaaagaaacggttcgtatatggtgaaagcatccctgccgaatggagcctcacttgagaaacaactggaggctattgatgaaaaactgacactcacggcgtccagtccgcttatcggtgtctatgcccctacaggcgctactctgacggcaacgctaacctctgcaaatggcactccagtggagggtcaggtcatcaactttagcgtaacgccagaaggggcgacgttaagtggcggaaaagtgagaactaactcttcaggtcaggctccagtcgttttgaccagcaataaagtcggtacatatacggtgactgcatctttccataacggcgtaacaatacagacacagacaaccgtgaaagtcactggcaactcaagcaccgcccatgttgctagctttatcgctgatccatcgactatcgccgccaccaacactgatttaagtaccttaaaggcaacggttgaggatggcagtggtaacctgatcgaaggtctcactgtgtacttcgccttaaaaagcggctctgccacattaacgtcattaacagcggtgaccgatcaaaacggaatcgcgacaacaagcgtgaaaggagcgatgacaggtagcgtcacggtaagcgcagtcacgaccgctggtggaatgcaaacagtagatataacgctggtggctggcccggcagacacctcgcagtccgtccttaagagcaatcggtcatcactgaaaggggactataccgatagtgctgaattacgtcttgttctgcacgatatatcaggcaatccgatcaaagtttctgaagggatggaatttgtgcaatcaggtactaacgtgccctatataaaaattagcgcaattgattacagtctaaatatcaacggtgattacaaagccactgttacaggaggcggagagggtatcgcaacgctgatccctgtattgaatggtgttcatcaagctggtctgagtaccacaatacaattcactcgcgcagaagacaaaataatgagcggtacagtatcagtcaatggtactgacctaccgacaactacattcccttcgcaggggttcaccggggcgtattatcagttgaataatgacaactttgccccaggaaaaacggcggctgattatgagttttcaagctctgcctcctgggtcgatgttgatgctaccggtaaagtgacatttaaaaatgtcggcagcaattcggaaaggattacggcgacgccaaaatcaggaggccctagctatgtatacgaaatccgtgtgaagagttggtgggtgaacgccggcgaggctttcatgatatacagccttgctgaaaatttttgcagcagcaatggctacacgctccccagagcaaactatttaaaccactgtagttcccgaggcatcgggtcactgtacagtgaatggggagatatggggcattacacgactgacgctggttttcaatcaaatatgtattggtcatctagtcccgcaaactcaagcgaacaatacgtagtttccctggcaacaggtgatcaaagcgtatttgaaaagcttgggtttgcttatgcgacatgttataaaaacctgtgattttccgttataatttcttaaagagtgttccattcggggcactcttttttacattccctctacagaactagcccttctctcacagaaaatgaataaataaaaatgcggcaccgccagaatcgcgttcgatgtgactatgatcattttcggtgagtactgctttgatctaaaggctggttttctgtgatgattgaccagcctcagagtattgatgacaccaccgttcataacagatcggcattactatgcataagtactgtctcatattctcgccaaaacactttttaatgcctttgcgaattcatccagacttatattgtcaattttttgcccaacgacgactgactccgagacatcggccattgcgggccatcgcgttttgtaatcagcataaattgcaacaacaggggtattataggcacttgccatatgtaatattgaggtgtcaggagttattgcgatataagcatcttttatgattgctgctgaacgtttaatcgagggtggtaaggataaacggtagacattattataacaatccactaatgccctggctttatcttcacctttgggtccatgaacgatcactattggtatatctgtttcactttaaatttttgctattagattttctgcaatcgataatgaaaatgtacgttcctgcgagctaccttctaaattgaacgcaatgtaagatcctaacgatcgcatttcctcgcgcacctcatcgagtacatcctcacttagtggcaattcatatattggcctgactgctggaaaacccgcctcacgcatcataaatgcccatgtcataggtacgggagcccggagtttctgatccatactggacgcgttcttgcacaaaggggagaagcaattcatggttataccaacaacctgaaaattcgtttttgctttcaactgactgataaataacatcgttttcaggttctttttacgcatcccctcaatgcaaagatccggcgtaccgtattgctgtgttatgttctttgctaaatcttttatttcttttaatgttgcgtgatcctgcatagtcattgtgactaatgttaatttagtctgttcaagtttaagcgcattaaagacttctaaattaattgtcgacgttacaattaaaagatgcttaattttatgcaattcaagcgcccgaataacaggaaagatggccatagcatcgccaatctgatcgggaatatggatgacaacaaagtctgttttttcaatattgaaattataagctttataatcgtagtaactaaatgcaatacgtctcaacaatgatgctaaaaacatacctaacctcgcctccctactggttataatgcaatgcagtctatcagactcatcagggtgccattttgtgcatatgcggacttttatgtttcatatctctaacctgtgggtcctctgcttaatccttaaacaacaccagcaactcctgcgctttcatcttccatcgaatttttcatgttgccgctaatcagccataaaatcatttgcagatgcgctctgtcgaggtagtctcataaggttcgtttatagatcgacggcaatgtgagttaccttttccatactaattataaaaagacagtacaaacaggatcattatggactccacgctcatctccactcgtcccgatgaagggacgctttcgttaagtcgcgcccgacgagctgcgttaggcagcttcgctggtgccgtcgtcgactggtatgattttttactctatggcatcaccgccgcactggtgtttaatcgcgagtttttcccgcaagtaagcccggcgatgggaacgctcgccgcatttgctacctttggcgtcggatttcttttccgtccgctcggcggtgtcattttcggtcactttggcgaccgactgggacgtaagcgcatgttaatgctgaccgtctggatgatgggcatcgcgacagccttgattggtattcttccttcattctcgaccattgggtggtgggcacctattttgctggtgacactgcgtgccattcagggatttgcagtcggcggcgaatggggaggcgcggcgttgctttccgttgaaagtgcaccgaaaaataaaaaagccttttacagtagcggtgtacaagttggctacggtgtaggtttactgctttcaaccggactggtttcattgatcagtatgatgacgactgacgaacagtttttaagctggggctggcgcattcctttcctgtttagcatcgtactggtactgggagcattgtgggtgcgcaatggcatggaggagtccgcggaatttgaacaacagcaacattatcaagctgccgcgaaaaaacgcatcccggttatcgaagcgctgttacgacatcccggtgctttcctgaagattattgcgctacgactgtgcgaattgctgacgatgtacatcgttactgcctttgcacttaattattcaacccagaatatggggctaccgcgcgaacttttccttaatattggtttgctggtaggtggattaagctgcctgacaattccctgttttgcctggcttgccgatcgttttggtcgccgtagggtttatatcacaggtacgttaatcggaacgttgagcgcatttcctttctttatggcgcttgaagcacaatctattttctggatagttttcttctccataatgctggcaaacattgcgcatgacatggtggtgtgtgtgcaacaaccgatgtttaccgaaatgtttggtgccagttatcgctatagtggcgctggagtcggttatcaggttgccagtgtggttggcggtggatttacaccttttattgccgctgcactcatcacttactttgccgggaactggcatagcgtcgccatttatttgctggctggatgcctgatttccgcaatgaccgctttgttgatgaaagacagtcaacgcgcttgatagcctggcgaagatcatccgatcttcgccttacacttttgtttcacatttctgtgacatactatcggatgtgcggtaattgtatggaacaggagacacacatgaataataagggctccggtctgaccccagctcaggcactggataaactcgacgcgctgtatgagcaatctgtagtcgcattacgcaacgccattggcaactatattacaagtggcgaattacctgatgaaaacgcccgcaaacaaggtctttttgtctatccatcactgaccgtaacctgggacggtagcacaaccaatccccccaaaacgcgcgcatttggtcgctttacccacgcaggcagctacaccaccacgattactcgccctactctctttcgttcgtatcttaatgaacaacttacgttgctgtatcaggattatggtgcgcatatctcagtgcaaccctcgcagcatgaaatcccttatccttatgtcatcgatggctctgaattgacacttgatcgctcaatgagcgctgggttaactcgctacttcccgacaacagaactggcgcaaattggcgatgaaactgcagacggcatttatcatccaactgaattctccccgctatcgcattttgatgcgcgccgcgtcgatttttccctcgcacggttgcgccattataccggtacgccagttgaacattttcagccgttcgtcttgtttaccaactacacacgttatgtggatgaattcgttcgttggggatgcagccagatcctcgatcctgatagtccctacattgccctttcttgtgctggcgggaactggatcaccgccgaaaccgaagcgccagaagaagccatttccgaccttgcatggaaaaaacatcagatgccagcatggcatttaattaccgccgatggtcagggtattactctggtgaatattggcgtgggaccgtcaaatgctaaaaccatctgcgatcatctggcagtgctacgcccggatgtctggttgatgattggtcactgtggcggattacgtgaaagtcaggccattggcgattatgtacttgcacacgcttatttacgcgatgaccacgttcttgatgcggttctgccgcccgatattcctattccgagcattgctgaagtgcaacgtgcgctttatgacgccaccaagctggtgagcggcaggcccggtgaggaagtcaaacagcggctacgtactggtactgtggtaaccacagatgacaggaactgggaattacgttactcagcttctgcacttcgttttaacttaagccgggccgtagcaattgatatggaaagtgcaaccattgccgcgcaaggatatcgtttccgcgtgccatacgggacactactgtgtgtttcagataaaccgttgcatggcgagattaaacttcccggccaggctaaccgtttttatgaaggcgctatttccgaacatctgcaaattggcattcgggcgatcgatttgctgcgcgcagaaggcgaccgactgcattcgcgtaaattacgaacctttaatgagccgccgttccgataataagttctgaaccttcttatcagaaatagatgtgaaggagtaagtaagacacctggcaaatagcctgcaataatcgtgggctgtttgcttccttgggcggatacgagttttattatcgtcttaatgatttccacatattaaaagcaagtatgctttcaaaacacaattataaaaaatcccgccaacaatataagtttttataaaattaaatataagattatggctttagaatatttttatttctaatagacgagatttttcctgttatgatataatatgctgaattaacacatgttaacgatttaccagtaatgtaaataaattttcgaggagatcattccagtgggacgtaaatgggccaatattgttgctaaaaaaacggctaaagacggtgcaacgtctaaaatttatgcaaaattcggtgtagaaatctatgctgctgctaaacaaggtgaacccgatccagaattaaacacatctttaaaattcgttattgaacgtgcaaagcaggcacaagttccaaagcacgttattgataaagcaattgataaagccaaaggcggcggagatgaaacgttcgtgcagggacgttatgaaggctttggtcctaatggctcaatgattatcgccgagacattgacttcaaatgttaaccgtacgattgctaacgttcgcacaattttcaataaaaaaggcggcaatatcggagcggcaggttctgtcagctatatgtttgacaatacgggtgtgattgtatttaaagggacagaccctgaccatatttttgaaattttacttgaagctgaagttgatgttcgtgatgtgactgaagaagaaggtaacattgttatttatactgaacctactgaccttcataaaggaatcgcggctctaaaagcagctggaatcactgagttctcaacaacagaattagaaatgattgctcaatctgaagttgagctttccccagaagatttagaaatctttgaagggcttgttgatgcccttgaagatgacgacgatgtacaaaaagtttatcataacgtcgcaaatctctaattatcttttaaagaaatctgtctttacggcagatttctttaatctcatataattcttataaaaaatataatattcaactcgtcatattgattatacccccccgttcccagagaaataatatttattaaaattccagttcttctttttctgattacagaaggcaaagtggcaattacgcatagtttcccgataaagacgcgatagcgacatcccgcataaggcatttttctctttatctttgtacggtacttcatggaacagagtttttgaccttgcgaatcgtgatgtctgttggggagggacaatttgctcactgaagcgtgagactcgattaagcgcacgaaacacagaaatcaaaaaacccggtcacttttttacaaggtaaccgggtaaaaataatttttattttttaactgttttgagactcatagagatgtctcaaaactaaaatttggctcctctgactggactcgaaccagtgacatacggattaacagtccgccgttctaccgactgaactacagaggaatcgtgagaacgaggcgaatattagcgatgcccacccacaatgtcaaagcctgttttttaaatttgaaatcgtttgctgaaataatctgcattttgtcgtttattccgacacaactggctttttttcacacttttgcggctcgggtcgagggtatttccatagccaacgtccagtaaccattcgccagtaaaacagcacggcccgcacagcccagtcggcaaacattcccatccagacaccaaccacaccccagccaagcatgattcccagcacataaccgactacaacccgacaaccccacatgctcaacatcgaaacccacatggcgtaacgggcatcacgagcacctttaaatccagcgggtagcacccatgaggcggaccaaataggcataaataaagcatttagccaaatcagaatcacaacgacatgtttaacctgtggatcctgggtgtaaaacgatgccataaccccggcaaagggagccgttagccaggcgatggccgttaatccaagagtggaaagccagaacacatgccgcaactgaatctctgcttgcgctatctgccctacccccaaccttcggcctgtaatgatcgtagaagcagagccgagcgcacttccgggtaagttgataagagccgcaattgaaaacgcgataaaatttccggcaataacactggtccccatcccggcaacgaacatttgggttaataaccgaccactggtaaataacactgattcgacactcgcgggaataccaatccccatgacttcccagataatgctaaaattcagcggtttaaaatagctctttaacgaaatccttagcgcaggattaaaaccaatcgccagcacccacaaaattgcaactgcgccaatataacgagaaatggttaaacccagccctgccccgacaaatcccagtcccggccaggagaaaaggccgtaaatcaatatgccgctaataataatattaagaatattcaggctaccgttaatcaatagcggtattttcgtattccctgcaccacgaagtgccccgctaccaataagagtgatggcagctgctggataactgagtaccgtcagctccagataagtcaacgccagtgctttaacttctgtcgtggcatcacccgcgacgaaatcaataatttgttcgccaaaatgatgaataagcgttgccaacagtacggcaaacaacgtcatgatcaccaatgactgccgcgtcgccaccctcgctcgtcgtcgatcccgcttaccgagactaaatgccacaacgacagtagtaccaagatcgatagcagcaaaaaaagccataatgaccatattgaagctgtccgccaatcccacgccggccatcgcatcttttcccagccagctgaccagaaaagtgctcagaacccccatcaacaggacacaggcattctccatgaagataggaacagcaagcggggttatctcgcgccagaacaacactttgtagctcttgcgtttagcgtgccagcgagtgccgtgaacaacctggcgtaaagcagaggagatattcaaagccgaccttaattgcagaaagtgaaaccacatttcaaataatgagggagaatcagcaaagctgcaaagattttcgccaacaaattgtctgcaaatgcaacaaactgttgatagaaacggcaaacagttggggaatttaaaaatcgggtttgacaaaagatttttcgccgttaagatgtgcctcaacaacgattcctctgtagttcagtcggtagaacggcggactgttaatccgtatgtcactggttcgagtccagtcagaggagccaaattcctgaaaagcccgcttttatagcgggatttttgctatatctgataatcaatttcctcttcactgctttccatcacctgccgcttgatatcctcaactgacagtcctgcattacaaagttccagaaagcgccagacatagttacgctgaagttgtcctcgcttcagtcccaaccagacagtattagcatcaaaaagatgccgcgtatccaggcggattaaattctcttcctcttgttcgccactggattgctcggcaactaatccgatcccaagcccaagagcaacataggttttaatgacatcagaatcctgcgcacttaatacaatatctgccagcaaacctttgcgggcaaatgcgtcatcaatacgtgagcgccccgtaatcccctgtcggtaagtgattaacggccacttcgctattgattccagcgtcaatggtgaaatttgcgtcaagggatgatcgtgtggaacaagcaaactatggtgccaacgaaaccacgggaaggcgacgagctgcgggtcattactcaaacgctcgctggcgataccaatatcagcttcgccattttgcaacaatgtcgcaatttcctgtggcgtcccctggattagctcgagccgaacctccgggaaaagttcgcgaaaagctttaatgacctctggcaagctataacgtgcctgagtatgcgtcgttgcaatagtgagaacgccagacgtatcgttggtaaacaggtctgcaagccgacgaacattactggcttcattcagaatacgttctgcaatgaccagtaatgctttgcccggttcagtcatgcccagcagtcgcttacctcgtcgaacaaatatttcgatgccaagttcatcctccagttcccgaatatgacggctgacgcctgactgtgaggtaaaaagcatattcgcaacctctgtcaggttgtaatcctgacgtgcagcctcgcggattatctttagttgttggaaattcacggtaaactccgggcagttcagatttcccgttattgttaaagtctaatgcccggcataacaaataataaaaacccgcatcttattccatcccgatataacacttagctcaccaattgccactgccttttttccatcactggagaactaatcactgacattaacaactctttcactgcctgtgcctgtggcgataagttcgctctggcgggtaaatttaatgacaaagagagactcatggaaggagtggtaatgcgtgacatccacccatttactgcgccacataacgaacgcgcggccgattcgggtaatactgcaacgcccatgccgctggcaatcgctgcggtaagcgtggcaatagactcaatttcaccaataacttttgccgtgagtcgccgtagggaaaaagcctcatcaacacgaagtctaatagcactgtaatcactggggagaaagaggttcatttgcgcaatagcattcacatcaacgctttgccccgggcaatcttgagttcctaccagaaaaagatcttctttcagcaaagcctgactggatacaccagccacaggggaatgctcataaatcaccgccatatcgagttggtgatttatcaatttttcgttaagcactgcaccactattttcatgaagatagataacgatctccggaaattcagcgcgaaccgcctgtaataagggcatggtgatggatgacgcagcggttcctggtgcaaagccaatcgagacttgccccgataatgcctgaccaacgttatgcaccgccagttgggcctgttcacactgacgtaaaatggcccgcgcatgggtatagagaatttttccggcgtctgttggtgtaacgccccgctttgtacggatcaaaagttgttgatttaactcaccttccagtgtggcaacctgctggctgagcgctggttgtgcgatatgcaatacttcagcagcctgggtcaggctaccaatatctacaatttttacgaagtatttcaggcgtctgaagttcatgttgcctccggtttttaagaatcggcccaagtgccgccattacttacaaccagattgcaagatgcttgccagttttattttggtgttgatgtacaagctaaccaactgtcaaataagagattatgatagattcgtcatttgctcctttaatcagctgtcgcgttcccctgccctataaaaggagggtatgcaccacgatggttcattacccaataagattgaaagctcaccactttgttgaaattgacagcaaacaaacaaaaaaatgcatttcaccctttgacatcaccatgcactgccattaatatgcgccccgttcacacgattcctctgtagttcagtcggtagaacggcggactgttaatccgtatgtcactggttcgagtccagtcagaggagccaaattcaaaaaagcctgctttctagcaggctttttgctttctaattaccaacgctcttaaaacatctgtcttgaaccagaactaatttgcacaggcattcccgatcgacgttgcaacgcagcatttgcgcgatttacatcaacttcttgcccgttgataaacgcccgcaaagatggggttaccggcaatggcacttttcggtcagactcatattctgcacgattgcgcgacaatggctcatgaacttccagccagttcgagccatctggttcagtggtgtattttactggctggtcgataatttgcacacgcgtcccaacaggaacattatcaaacagatatttgatatcgtcattgcgcagacgaatacagccctgacttacccggagcccaataccaaaattggcattggtaccatggatggcatacaacctgccaatataaatcgcgtacagccccatgggattatcggggcccgcaggaacaaatgcgggcaaactctcccctcgtttcgcatattcgcgccgagtgttcggcgttggcgtccaggttggagcttcttgtttacgttcaacggtagtcacccagttacgcggggtttctcgcccagcctggccgataccaataggaaagacttccacagtattactgtctggtgggtagtaataaagacgcatctcagcgacgttaacaacaatccctttacgaacagtgtcgggcaaaatcagttgctgcggaatggtgagttgcgagccagacttcggcaaaaaaacatcagcgcccgggttcgcttccagcatgttacttaacccttgcccgtattgtgcggcaaaagtctccagcggctgggtattgtgatcaggaacagttacagtaaacgactgccccactaaacggctaccctctggaggtaatggataagttaccgccaggctagtatggctggcaaaaagcagagcaaatgagcaaagaatatttacacgacgcatcatgtccctttcctatgtcgcgaaagctatccgttaagtatagcttttatcagacttttcgtttttaactgttcaaatcagaagtcgtattccccggtagaacaatattactggcagcaagttcgcccatgttgttgtatatcgcacaggcagcttcgatgatgggcatcgccagagctgcgccactcccctcacctaaacgcatctccatattgagataaggctccagccccaaatgcgagagcgctatacgcgcgcctttttctgccgacaggtgagaaggaatgagatacggtttgatcgcaggagacatctggcaggctgcgagcgcagcagcataagaaagaaatccatccagcaacacgggtaaaccgcaggaagcagcacctaacatcactccagctattccgaccaaatcaaatccacccacttttgccaggacatcaacaccatcctgaggatttggttgattcaacgtaatcgcccgacgcacaacatcaattttattagccagtttatctgtcggcaggtttgcgccaatcccaaccacttcttcaggatcccggccagtgattgtgctgactattgctgctgccggtgtcgtgtttgccatccccagttcacctacaccaaacagcgtgacaccgttttttgccagctcctgcgtataacatatgacgtccaaaagcaacttttcagcctgacggcgactcattgccggagctgaagcaatattgccgctacctcgtgcgacacgcatgttgataagcccggggataggctcagcagtatcaataccaacatcaattacgtggacgttagcgcccgcttgttctgccagcacacacacgccggttgttccacgggtcatattttcagcctgtatggctgtcacttcttttggagaaatagcgaccccttcctcccagacgccgtgatcggcacacataaccagtaccgcttttttgcccacatgcggtatgccattcaaccccggcattcctgccagttgtatggcaagcacctccagctttcccaggctaccaacaggtttgagtaacccgtcaatatgccgttgtgcacgcgacatagcggtagaatcgatggctgggatcgtattcagtaaatcggcaagtatttgcatctcacgtctctttatagcagtgccagcaggaagaccagttcaccaagctctatggctgctcccagcgtatcgcccgtttgcccgcccagcgtacgtttgagaagctgaccgaggatgaaaatcgccaccatcgtcaccaccatagcagccacaccatgcatacccggcaataatacggcagcaaaaatagcggctaagccgagtgtgacgcaggtttgtcgcccatcaattttgccaatgaacacattgccaagcccttcttcccgcgcataacgatgacgatacatcaataatgcggcagtcccgcggctgaccgcacatgctgccgccagcgatgcaaggatcgattcgccacgcagagccaactcgcttaacaccagaatctttgccagtaccacaaaaatcaatgccagaccgccgtgggtgcctaaacggctatcacgcatgatttccaacatgcgatcgcggctacgtgcagaaaatacgccatcacaggtatcagcgaggccgtccagatggaatcccccggtcatcagcaccagcacaagtacgctaaacagtgccgccagtggtgcgccacaccatgcctgcagcaccatgaagaccagcccgctaatcgcgccaagcaataatccaatcaaaggaaaagtaataataccgcgagaataatgctcgaaatccagtccctgggaccagcgacgcggtacaggcagacgcgtaataaatgagagcatcgcccaaaataatttactcatttgatttttactccaatacccgaaaccaccagccatacttcatttgccgcagcggccaactgctgatttacccgcccggcaatatcacgaaaatgtcgtgccagacgactctccggcacaatccccattcccacttcgttagtcactaatacaacctttgcggggcaacgttggcaggcagcaatcaacgactgaatctcagcattaatcgcctgttccatcgcctgataatcccattcatcagggtctttatcgccgccataatcaaacaacagattagtcaccattgtggtaacgcattcaagcaacacaacctcattcgggttaatgtctgcatgaattaattcatcaagatgttgccagcgctccactgtgcgccagtgctccgggcggccttgccgatgatgttctatccgtgcagccatctcatcatcaaggatttgcgaggtagcgatatacagaacctgtgaagagtccccaataagcgcctctgcgtggcgactcttcccgctccgtgcgccccccgtcaccaaaatcatcataccgactcctgattcaaatgtatgatggtattcattgaacagaacaatggatcccccaccgttgctgaccgcaaaacatttacgcgattaatactgcgcgtaatataattaaaaatccagcattctcaatccattacgaaataagatggcattacggaatagccagactttctcgtgttaacgtccgacaaaatgcgtcattgacagcggtttctgtggattgacacatttcattcagataatgaattaatgctactgccggaacaaccagcaaacgggcattgtgttctgaaatccaggctattgattcaacgtcagcgacagatctgcgctgtaaaagaacttgtaaaacaacgtaatagaattatccggaatggtggcgactatgcactagggaaggtgcgaataagtggggaaattcttctcggctgactcagtcatttcatttcttcatgtttgagccgattttttctcccgtaaatgccttgaatcagcctatttagaccgtttcttcgccatttaaggcgttatccccagtttttagtgagatctctcccactgacgtatcatttggtccgcccgaaacaggttggccagcgtgaataacatcgccagttggttatcgtttttcagcaaccccttgtatctggctttcacgaagccgaactgtcgcttgatgatgcgaaatgggtgctccaccttggcccggatgctggctttcatgtattcgatgttgatggccgttttgttcttgcgtggatgctgtttcaaggttcttaccttgccggggcgctcggcgatcagccagtccacatccacctcggccagctcctcgcgctgtggcgccccttggtagccggcatcggctgagacaaattgctcctctccatgcagcagattacccagctgattgaggtcatgctcgttggccgcggtggtgactaggctgtgggtcaggccgctcttggcatcgacaccaatgtgggccttcatgccaaagtgccactgattgcctttcttggtctgatgcatctccggatcgcgttgctgctctttgttcttggtcgagctgggtgcctcaatgatggtggcatcgaccaaggtgccttgagtcatcatgacgcctgcttcggccagccagcgattgatggtcttgaacaattggcgggccagttgatgctgctccagcaggtggcggaaattcatgatggtggtgcggtccggcaaggcgctatccagggataaccgggcaaacagacgcatggaggcgatttcgtacagagcatcttccatcgcgccatcgctcaggttgtaccaatgctgcatgcagtgaatgcgtagcatggtttccagcggataaggtcgccggccattaccagccttggggtaaaacggctcgatgacttccaccatgttttgccatggcagaatctgctccatgcgggacaagaaaatctcttttctggtctgacggcgcttactgctgaattcactgtcggcgaaggtaagttgatgactcatgatgaaccctgttccatggctccagatgacaaacatgatctcatatcagggacttgttcgcaccttccctagaacaccacaatttcgctctctcggtaaggcactgtcacagcattcaacagaatgtgacttgccagatttattagcgccaccagatgtttaaccgggtaaccacgacccagtcggggatatattccatcttctcgctgacatcatcaagaataaaaaggtttatcacactcagagcaacgttcttcagcaggcgggataattcttcaacatttagaagatgtgttattaaaggcatacaaactggacgtattgtattttcttttggtggttgacctaaggtagcagtttatcctgatgcgctgagatttctgtaatatctacgtcaacattctcctcgaatagaaaatgcagccccggcaagtgattcacattttttaacaaaacgttgttagcgtgccattttcagaagctctccaagaaagcgaattcttttctcaaattctgcattctcagacacagctttctactccatggtaatggcccaaatacgaagttgctcaggatcattagtggtgctgagaagttaaataaccatgcggagtaccactcgtcatcacgtatttatatatcatgaagctattgttgtgttttgtacatcagtagatatattctgatatactccttttgctagacataacctttcacctgcttgcaaagcttctgtgttctgacattgccaaattgttgcaattctgtatccagccttctttcagtcatagcttcgggccgcgataagactcactgatctgaccctgattcctcttgcagactttatagaccaattaaaatgcagtttctgcaggtcaacgtctgaccatcattgtcatcactctggccattagagtaaccttctgcattcatccttttgtaaaaagtttatattagtatcagcaattaaccggacctgatactgatatgagtcttaccgcatatacggtcaatttcagcaattaattacattatccacgccaaagtatttgtcatcacaatgatggtaccttctttcagacaccattttttcaactccgttttccacggaccgcactcttatgtcaagagtgcggtccgtggatacaaccagagaccgactgacacgagtcagaggaaacgacggatatgttcagtcgtaaaatatctatcaaaaaacatgattaaggtcaaaaatgtttgatatttacaatttatgaagatgacaataattatagatatatgagaacataaatgaaaataattatcattacagtaatcatttgtactttgtattaatgagggatgaaatgttatataatataccttgtcgaatttatatcctttccactctgtcattatgcatttctgggatagtttctactgcaaccgcaacttcttcagaaacaaaaatcagcaacgaagagacgctcgtcgtgaccacgaatcgttcggcaagcaacctttgggaaagcccggcgactatacaggttattgaccaacaaacattgcagaactccaccaatgcctccatagccgataatttgcaggacatccccggagtagagataacagacaactccttggcaggccgtaaacaaatccgcattcgtggctggatttgcccctatatttccagacatctgttatcacttaacccattacaagcccgctgccgcagatattcccgtggcgagcgataacccagcgcactatgcggatgccattcgttataatgctcgaacgcctctgcaaggttctttgctgccgttaacccgtctggtttgggcatgatactgatgtagtcacgctttatcgttttcacgaagctctctgctattccgttactctccggactccgcaccgccgtgttcttcggttcaagtcccaacatccgggcgaactggcgtgtttcattagcccggtagcatgaaccattatccgtcagccactccactggagacgacggaagatcgttgccgaagcggcgttccaccgctcccagcatgacgtcctgtactgtttcactgttgaagccgccggtagtgaccgcccagtgcagtgcctcacgatcacagcagtccagcgcgaacgtgacacgcagtctctctccgttatcacagcagaactcgaacccgtcagagcaccatcgctgattgctttctttcacggccactctgcctgtatgtgcccgtttcgatggcggtacagcaggttttcgctcaagcaacagcgcattctggcgcatgatccggtaaacacgtttggcattgatcgcaggcataccatcaagttctgcctgtctgcgaagcagcgcccatacccgacgataaccatacgttggcagctctccgataacatggtgtatacggagaagcacatccgtatcatcagtgtgacgactgcggcggccatccatccagtcatcggttcgtctgagaatgacgtgcaactgcgcacgcgacacccggagacaacggctgactaagcttactccccatccccgggcaataagggcgcgtgcgctatccacttttttgcccgtccatattcaacggcttctttgaggagttcattttccatcgttttcttgccgagcaggcgctggagttctttaatctgcttcatggcggcagcaagttcagaggcaggaacaacctgttctccggcggcgacagcagtaagacttccttcctggtattgcttacgccagagaaataactggctggctgctacaccatgttgccgggcaacgagggagaccgtcatccccggttcaaagctctgctgaacaattgcgatcttttcctgtgtggtacgccgtctgcgtttctccggccctaagacatcaatcatctgttctccaatgactagtctaaaaactagtattaagactatcacttatttaagtgatattggttgtctggagattcagggggccagtctagtggcgaagcatcctcccgtgttttaattctcattgatggtcaggaggtaacttatcagcgcgccggagataattatggtgtgggactgttgatagatgagtctgcgctggagcgtgttgaggtagtgaaaggtccatattccgtactgtacggttcacaggcaattggcggtattgttaacttcatcaccaaaaagggtgaatctccggactccctatatcacttaaattgatacaactttttagagtagtcattagtgaacagataattgataactcagaaccagtaaaatgcaaaagacgcaccacgctgggaaaatcgctgctattcagcagagttttgtatcgagaatggtggccagccacttattgctctcgcgtaagcgggtaccgtgacattctgcctgaacttgacctggtactgtggctgattaaagccgatgaccgtgccctgtctgtggatgagtatttctggcgacacatcctgcagtgcggacatcagcaggtgctgtttgtggtgacgcaggccgacaaaacggagccctgccatgaatgggatatggccggtattcagccttctcctgcacaggcacagaatattcgcgaaaaaacggaggcggtattccgtctgttccggcccgtacatccggttgtggccgtatcggcccgcaccggctgggaactggatacgctggtcagtgcgctcatgacagcgcttcccgaccatgccgccagtcccctgatgacccgactgcaggacgagctgcgcacggaatctgtccggtctcaggcccgtgaacagtttaccggtgcggtggaccggatatttgacacggcggagagcgtctgtattgcctctgttgcacgcacggttctgcgtgccgtccgtgacacggtggtctctgttgcccgtgcggtatggaactggattttcttctgaacctgtcgtgactgatgccctccctgactctgagtctgctcacaaaagcactgttttcgttactgtctctcttgtccgtgcaatagctcaataatagaataaaacgatcaatatctattttatcgatcgtttatatcgatcgataagctaataataacctttgtcagtaacatgcacagatacgtacagaaagacattcagggaacaacagaaccacaattcagaaactcccacagccggacctccggcactgtaaccctttacctgccggtatccacgtttgtgggtaccggcttttttattcaccctcaatctaaggaaaagctgatgaaacgacatctgaatacctgctacaggctggtatggaatcacatgacgggcgctttcgtggttgcctccgaactggcccgcgcacggggtaaacgtggcggtgtggcggttgcactgtctcttgccgcagtcacgtcactcccggtgctggctgctgacatcgttgtgcacccgggagaaaccgtgaacggcggaacactggcaaatcatgacaaccagattgtcttcggtacgaccaacggaatgaccatcagtaccgggctggagtatgggccggataacgaggccaataccggcgggcaatgggtacaggatggcggaacagccaacaaaacgactgtcaccagtggtggtcttcagagagtgaaccccggtggaagtgtctcagacacggttatcagtgccggaggcggacagagccttcagggacgggctgtgaacaccacgctgaatggtggcgaacagtggatgcatgagggggcgatagccacaggaaccgtcattaatgataagggctggcaggtcgtcaagcccggtacagtggcaacggataccgttgttaataccggggcggaagggggaccggatgcagaaaacggtgataccgggcagtttgttcgcggggatgccgtacgcacaaccatcaataaaaacggtcgccagattgtgagagctgaaggaacggcaaataccactgtggtttatgccggcggcgaccagactgtacatggtcacgcactggataccacgctgaatgggggataccagtatgtgcacaacggcggtacagcgtctgacactgttgtgaacagtgacggctggcagattgtcaaaaacgggggtgtggccgggaataccaccgttaatcagaagggcagactgcaggtggacgccggtggtacagccacgaatgtcaccctgaagcagggcggcgcactggttaccagtacggctgcaaccgttaccggcataaaccgcctgggagcattctctgttgtggagggtaaagctgataatgtcgtactggaaaatggcggacgcctggatgtgctgaccggacacacagccactaatacccgcgtggatgatggcggaacgctggatgtccgcaacggtggcaccgccaccaccgtatccatgggaaatggcggtgtactgctggccgattccggtgccgctgtcagtggtacccggagcgacggaaaggcattcagtatcggaggcggtcaggcggatgccctgatgctggaaaaaggcagttcattcacgctgaacgccggtgatacggccacggataccacggtaaatggcggactgttcaccgccaggggcggcacactggcgggcaccaccacgctgaataacggcgccatacttaccctttccgggaagacggtgaacaacgataccctgaccatccgtgaaggcgatgcactcctgcagggaggctctctcaccggtaacggcagcgtggaaaaatcaggaagtggcacactcactgtcagcaacaccacactcacccagaaagccgtcaacctgaatgaaggcacgctgacgctgaacgacagtaccgtcaccacggatgtcattgctcagcgcggtacagccctgaagctgaccggcagcactgtgctgaacggtgccattgaccccacgaatgtcactctcgcctccggtgccacctggaatatccccgataacgccacggtgcagtcggtggtggatgacctcagccatgccggacagattcatttcacctccacccgcacagggaagttcgtaccggcaaccctgaaagtgaaaaacctgaacggacagaatggcaccatcagcctgcgtgtacgcccggatatggcacagaacaatgctgacagactggtcattgacggcggcagggcaaccggaaaaaccatcctgaacctggtgaacgccggcaacagtgcgtcggggctggcgaccagcggtaagggtattcaggtggtggaagccattaacggtgccaccacggaggaaggggcctttgtccaggggaacaggctgcaggccggtgcctttaactactccctcaaccgggacagtgatgagagctggtatctgcgcagtgaaaatgcttatcgtgcagaagtccccctgtatgcctccatgctgacacaggcaatggactatgaccggattgtggcaggctcccgcagccatcagaccggtgtaaatggtgaaaacaacagcgtccgtctcagcattcagggcggtcatctcggtcacgataacaatggcggtattgcccgtggggccacgccggaaagcagcggcagctatggattcgtccgtctggagggtgacctgatgagaacagaggttgccggtatgtctgtgaccgcgggggtatatggtgctgctggccattcttccgttgatgttaaggatgatgacggctcccgtgccggcacggtccgggatgatgccggcagcctgggcggatacctgaatctggtacacacgtcctccggcctgtgggctgacattgtggcacagggaacccgccacagcatgaaagcgtcatcggacaataacgacttccgcgcccggggctggggctggctgggctcactggaaaccggtctgcccttcagtatcactgacaacctgatgctggagccacaactgcagtatacctggcagggactttccctggatgacggtaaggacaacgccggttatgtgaagttcgggcatggcagtgcacaacatgtgcgtgccggtttccgtctgggcagccacaacgatatgacctttggcgaaggcacctcatcccgtgcccccctgcgtgacagtgcaaaacacagtgtgagtgaattaccggtgaactggtgggtacagccttctgttatccgcaccttcagctcccggggagatatgcgtgtggggacttccactgcaggcagcgggatgacgttctctccctcacagaatggcacatcactggacctgcaggccggactggaagcccgtgtccgggaaaatatcaccctgggcgttcaggccggttatgcccacagcgtcagcggcagcagcgctgaagggtataacggtcaggccacactgaatgtgaccttctgacagaaccatcgcctctctgtggtcccggtcatcatgaccgggacccggaccggcgcaacggatcttcaacgccacattcgctggcattaacaataacatgatattcatcacggagtgactatgttacagatagtcggcgcgctgatcctgctgatcgcaggatttgccattcttcgccttttgttcagagcattaatcagcacggcttctgcgctggcagggctcatattgctgtgtctgttcggcccggccttactggctggctatatcaccgaacgcataacccggttgttccatattcgctggctggcaggcgtatttctgacgattgccggaatgatcatcagcttcatgtggggacttgatggtaaacatatcgcgctggaggctcacacctttgactctgtgaaatttattctgaccaccgctctcgccggtggtctgctggctgttcccctgcagatcaaaaacattcagcagaacgggatcacaccagaagatatcagcaaggaaattaacgggtattactgctgtttttatactgcctttttccttatggcgtgttctgcatgcgcaccattgatcgcgttacagtacgatatttcaccgtcactgatgtggtggggcgggttgttgtactggctggctgcattagtgacgctgctatgggcggccagccagatccaggcgctgaaaaaactgacctgtgccatcagccagacactggaagaacaaccggtgctcaacagtaaatcgtggctgaccagtttgcaaaacgattacagccttcctgactcactgacggagcgcatctggctgacgctcatttctcaacggatttcccggggagagctgagggaatttgaactggcagacggaaactggttactgaacaatgcctggtatgaaagaaacatggcagggtttaacgaacagttgaaagagaacctgtcattcacacctgatgaactgaaaacgctcttccggaaccgcctgaatttatcaccggaagcgaatgacgattttctcgatcgttgcctggacggcggtgactggtatcccttttcagaaggtcgccgttttgtatcattccatcacgtggatgagcttcgtatctgtgcctcctgcgggctgacagaagtacatcatgccccggaaaatcataagccggatccggaatggtactgctcctctctttgtcgcgaaacagaaacactgtgtcaggaaatttatgaacgcccttacaacagctttatttccgatgcaacggcgaatggtctgattctcatgaaactgccggaaacctggagtacaaatgagaaaatgtttgcttccggagggcagggacatgggtttgccgctgaacggggaaaccatattgtcgacagagtccgtctgaaaaacgcacggatcctcggtgataataatgccagaaatggagcagacagactggtcagcggaacagaaatccagacgaaatattgttcaactgcagcccgtagcgtcggtgcggcattcgacggacaaaacggacagtatcgttacatgggaaataatggccccatgcaactggaagtcccccgtgatcagtatgccggcgctgttgaaaccatgaggaataagatccgcgaaggtaaagtagaggagagatgacgcccggcgagcgcagcctcattcaacgggccctgaaaaccctggaccgccatcttcatgaacccggcgtggccttcacctccacccgtgcagcacgggaatggctgattctgaacatggcgggactggagcgtgaagaattccgggtgctgtatctgaacaaccagaatcagctgattgccggtgaaaccctcttcaccggcaccatcaaccgcacggaagtccatccccgggaagtgattaaacgcgccctgtaccacaatgccgctgccgtggtactggcacacaatcacccgtccggtgaagtcacacccagtaaggcagaccggcttatcaccgaacgtctggtacaggcactgggcctggtggatatccgggtgccggaccatctgatagtcggtggcaaccaggttttctcctttgccgaacatggtctgctttaacccttcacaaccacatcacacctgttttcacttttatcttctgtcttcagaggtatcccattatgaaaattatcacccgtggtgaagccatgcgtattcaccaacaacatccgacatcccgtctttttccgttctgtaccggtaaataccgctggcacggcagtgctgaagcgtataccggtcgtgaagtgcaggatattcccggtgtgctggccgtgtttgctgaacgccgtaaggacagttttggtccgtatgtccggctgatgagcgtcaccctgaactgagtgggaattctgatgagcagaattatcgccactaccggaccattcttagccgattttctgtaaggattttatcgtgtcagacacactccccgggacaacacttcccgacgacaatcacgaccgcccctggtgggggctgccctgcaccgtgacgccctgtttcggggcacgtctggtgcaggagggtaaccggttgcattaccttgccgaccgcgccggtatcagaggcctgttcagcgatgcagatgcgtaccacctggaccaggcctttccgctgctgatgaaacaactggaactcatgctcaccagcggtgaactgaatccccgccatcagcataccgtcacgctgtatgcaaaagggctgacctgcaaagccgataccctcagcagttgtgattacgtttatctggctgtttatccgacgcccgaaatgaaaaattaactctccagaatagccttctgctacggcctggtgttttcaccacgccacttttccatttttatatctgcatatcaggaaaatcttcagtatgaaaacattacctgtattacccgggcaggcggccagttctcgcccgtctcctgttgaaatctggcagatactgctgtcccgactgctggaccagcactatggcctcacactgaatgacacaccttttgccgatgaacgtgtgattgagcagcatattgaggcaggcatttcactgtgtgatgcggtgaactttctcgtggaaaaatacgcgctggtgcgtaccgaccagccgggattcagcgcctgtacccgctctcagttaataaacagcatcgatatcctccgggctcgcagggcgaccggcctgatgacccgcgacaattacagaacggtaaataacattaccctgggtaagtatccggaggcgaaatgatgacactggaagccgacagcgttaacgtacaggcgctggatatggggcacattgtcgttgacattgatggtgttaatatcactgaactgattaataaggccgctgaaaacggttattcactccgcgtggtggatgaccgtgactctaccgaaacaccggcaacttatgccagccctcaccagttgctgtaagacaatgcagtgatacagggtatagtgccattaaccacagaaacagcactgttgtcctgtattaagcaggcaagagaagatgtccttaccctgcgccatctgcagcttctgcaccagaaccggtgaatctcactcaacaggcttcatttctcctgacgccagcctgaatacagctggcgttttcatttataaacagaaaggaaaaccgataataatggaatggacgccccgaccatgaagcaacggtaggatattactgataaaccttccagtggaggtgcgttatggccgttttaacgattagcattgacctgacaaaaaatgaattccaaatccacggtctgggtaggaacagaaaaatctaagctcagaaaacggattaaagtaagcgtcaacggagcaccgtattgacgcttatttattggtgagaactacgttccatggcaggagttcgtcaacacggttggagggccattccggcagtatgctcagaatatggcgcagatacgcttccggatcgataccgttcagacggcaggtgcctgcttttctggcaacaagcaggaatctcagcgctgaagcaggaattagaggtaaaaacgccctaccgggccatgaatcacccggtcattggagtagtaaccaaagcagatttagccagcatggaacaaatatctttggtgaaaagttggttacgggaagctggagcgcacaacgtgttagtaaccagtgcagttaataacaatggagttacagaactttttgccttgctgcatacagaagaaggctgttgttaatttcgattggttctcggatgagaatgatgacggtgatacacagataagaatcaatgagcaatgagggttgccgggcaaccctcattgaataaaacgggaattacttcgcttcgccgtttttcatttcgcccatagctttcagctttttggagatatcgcggcgttctttggagagctcggcatttttgatgatgtaatcgtcaacgcgatcttcatagtcacctttcatgctggcgatgatgccctggattgcttcaacgctcatccccggcttgatgtaatcgctcaggttgtccagcagcaggacgcgcttctggttgtcacggatctttttctcaacgtcctgaatttcacgttgcagtttgttcttacgacggaacagacgaacaaattccagtacgtcctggaatgaaggcttggtagtttccatttttatacccctgataatgtgagagtcggattcgtttaagcaaccgctattcgttagggccaacattactcatagctgccgcagatgacaatgcttttatcccttttcactatcataccctttatccttgctgaatcgaagcagcagcaagatgattctgaagttcaggaattatttgcgcaaggcccggcaaatcagattcgatagcaactcaagctgatgcgccgtttccatgttcagccacacataaccatagattggtgtttccacaaccttcaggtcatggtggttattgagcaactgacgcagctcttccacagcatcgttcaatttttccgtattggcaaaaaccggctgcggattaccttcgtacagcgcatgaacaaggctcagcagtatttgctgcatcatgtgctgggtatcacgaagtttttgcgcgttcaataacacgaaatggctggggcgcgtggcccagtatgcattgatttgcaactccagcatacaaaccagattgcggttaatggtctggataccttcatatatcgattttggaatacgggtttctttgctggcgggcgcaatcagtccacgcattttcacggcatcggtcaggagtttttgtagatggctttccagacgtgggcgttcgagtaagttcggtgagaatgcagattgatagacccgattatactcggtcagacttttcgccagttgaatgcgccagtggatgaacgcccgttgtggccagataccggtaaacaacattgccagtaaagagccgaggatcacatcgccgcttcgccataacgccgtatcaatttcacctgtcggggaacccacaacaattgccagcgtcaccccaatcaataaaccttgatacggtttcttgcccagcgccagccaaccgcaaaggaacatggccgccgcgcaccagactaacatcagcggtaacgagattaactccagttgcagagcgataagacctaaaatcgaacccaacaccgtaccgccaatacgctcaaaggcgcgagggacaacgttaccccagaacgagattggccccataatcaccaccatggtgaccagcggccaggtgctttccgggatagtaaacaggcggataatgagaaaagtgagcaggaatgccagcgcgacccgagtaccatgcacaatgcggtaatggcggtatacccggatttcaaacgggcttaatgacttatcggcacgcacgcagaaactccgtaatgagattaaaagcgctcataactcatctgtcggccagaaggcgcgcctctgaattatccgacggacaaaccgggaacagtgtaatttcccggcaggagcgaaaaaattgaaaggcgcatcttactcttttcgctttcaaaaaaaagagtggtcatcgcgttaacacaccgccctgagatgaattagtgatgttttggctgcaccgcaacatacatttcgatatcccagtacccatcttccgcgccattgttcaaataaacctcgaagcagggctttggtaacatttcataagcactgtcctgcaagagactattaaagaactgataccagggtttagcaaaatcatcaccgactacacgagctaccgccaccgcatactgaccacctgtaatttctgtcagaatgacgccctcactgttttcgggaagcgtaaagtaacccggcaccgtcacgacggtgtcgcagcgtaatttttcggcgggtgtttcatctggattgtcgtaatagacagcaacccactccttcggcacaatatttttgctatctacccacatcatcaactgctcaaagcctttctttaccgtctgttcccacgggccaacgagatggaaacctgcaacggtacgtttctcttcctgcttaatctcgtagttcatgacgcctccattgatactgtttttatatacagtatagttgcaaaattaaaaccacaaggaatgagtgttgattatgcgagcagactcgcactcctgccagtctgctgcaaaagaaaggtcaggccttatggtggaaataatcactcaggcgagaaaacatgctgccttccccgacagattccagggtaaccagcggccagtgcgccacctgtttatcacggtcgtaaagttcaatttcccctacccgctgatgggcgctaattggcgcggtgagttctttaccatcaagggtatatttggctttgatatgtggaatttcggctttcggtagcaccatccagaactcttgttccgttcccaggtcgatattttctttatcgccataccagatgcgttccgttccgacctttttcccacggtgcaaaatttgcaccgtagtaaagttttgttgcccccaacgcagtaattttcttgcctcttcctcacgaccttttgcactgtcagcccccattaccactgcaatgagacgacgctgcccatctacagccgaagcaatgagattaaacccggcaccagaagtatgacccgttttcaggccgtcaacattcatggttttatcccacaacaacccgttacggttttgctgggtgataccgttccaggtgagacttttctcactgtacatatgataaaactcgggctcgccgtggatgatagcacgagaaagcacagctaaatcataagccgagctatgctggccaggtgcatccagaccatgcactgtttcaaaatgcgtatccttgagatgcagcttctcggcatagttgttcatcatttcaacaaactgccgttgcccaccggcaatatagtcagccagagcaacacaagcgtcatttccggaatccacaattaaaccacggcttaaatcacgtaccgatacgcgatcgccctctttcaaaaacatcagtgaagaaccgacaaacaccggattatctttcgcccacgcatcgcgccccacggtgacaatatcgtctggcgtaatgcgatgactatcgatagcgcgatccacgacataacccgtcatcagctttgtcaggctggcgggattgcgctgttgatgctcattacccgcggtgaggatctgaccggtggtgtaatccatcaatacccaggacccggcatgaatctctggaggctgaggtgaaaaaggaatgttttccgccgcaaaaccagacgataagttaaaaacgaacaaagaagcagcaataataagacggcgtttcaacagcaaaccctcaggagtttcaaatagctgttctttttacggaaatacttatgaactggctggaataaagtgcaagaaaatgtgactaccctctcatttttatctgacatgatctgttgccactcgctgccaaattgtggcgctaaagctgattagcacggtgatatttgatactctggcagacagcagaaataacggatttaacctaatgatgaatgacggtaagcaacaatctacctttttgtttcacgattacgaaacctttggcacgcaccccgcgttagatcgccctgcacagttcgcagccattcgcaccgatagcgaattcaatgtcatcggcgaacccgaagtcttttactgcaagcccgctgatgactatttaccccagccaggagccgtattaattaccggtattaccccgcaggaagcacgggcgaaaggagaaaacgaagccgcgtttgccgcccgtattcactcgctttttaccgtaccgaagacctgtattctgggctacaacaatgtgcgtttcgacgacgaagtcacacgcaacattttttatcgtaatttctacgatccttacgcctggagctggcagcatgataactcgcgctgggatttactggatgttatgcgtgcctgttatgccctgcgcccggaaggaataaactggcctgaaaatgatgacggtctaccgagctttcgccttgagcatttaaccaaagcgaatggtattgaacatagcaacgcccacgatgcgatggctgatgtgtacgccactattgcgatggcaaagctggtaaaaacgcgtcagccacgcctgtttgattatctctttacccatcgtaataaacacaaactgatggcgttgattgatgttccgcagatgaaacccctggtgcacgtttccggaatgtttggagcatggcgcggcaataccagctgggtggcaccgctggcgtggcatcctgaaaatcgcaatgccgtaattatggtggatttggcaggagacatttcgccattactggaactggatagcgacacattgcgcgagcgtttatataccgcaaaaaccgatcttggcgataacgccgccgttccggttaagctggtgcatatcaataaatgtccggtgctggcccaggcgaatacgctacgcccggaagatgccgaccgactgggaattaatcgtcagcattgcctcgataacctgaaaattctgcgtgaaaatccgcaagtgcgcgaaaaagtggtggcgatattcgcggaagccgaaccgtttacgccttcagataacgtggatgcacagctttataacggctttttcagtgacgcagatcgtgcagcaatgaaaattgtgctggaaaccgagccgcgtaatttaccggcactggatatcacttttgttgataaacggattgaaaagctgttgttcaattatcgggcacgcaacttcccggggacgctggattatgccgagcagcaacgctggctggagcaccgtcgccaggtcttcacgccagagtttttgcagggttatgctgatgaattgcagatgctggtacaacaatatgccgatgacaaagagaaagtggcgctgttaaaagcactttggcagtacgcggaagagattgtctaatttgaagcctccgccgctggtacggcggaggacaatgttgagtcaggctttttgaacggtgatgctccacgctgcatcgccaatctgctgataatcggtgatggcatgtccttcttctgccgcccactgtgggattgcttcagttgcctgggtgcaatcaaactcaatcactaactcatcgccgctgaccatttctgccagagctgcttttgcttctatgagtggaaacggacagacctgcgtcaccacatccagctttttaatcaccatctttacaccttacttaatttgccgcagcagttgccagtcgcgccttacgctgcggtcgaacatacacaagccaggacgcagtccagactccgagaatcataaatacaaggccaatccagccctgccaggtcatcattgcagtcataaccagtccattaccgatagagcaaccacctgcaatactggcaccgaagcccatcagtacaccacctaacccgctacgtaatgttgtttgtgcatcagctgcgcgaacgcggaactcacggctcgctttggctgcaataaatgaccccacgaagatccctaacaccaggaaaacgccccagttaatgtatttcatgtcacccgcgaccagaaattgcagaatattggccgttggggaagtgattcctaacccaaacatgcgtccggttgcttcactcaggggccaggctaaaagcgcaatcaaaccgatgagtacagctgtgacaaagggatgccagcgtttttcaaacagaatatgagcgatcccggttcggcgcggcggtaaggtcgcgactttgagttttggcttcttcaactctttcatcaccacccagagcgttatcaccagcaaaacggcaaccaacggccacacagacaaattaaaagtctcagcaatagagttatgttcagtactgtagtgctgcaaggtttgatttaaaccactggcatgtggagaacgcatcaccgcactcatcaccatataagtgaaaagcgcgatccaactgccgatcaatccctcacccgcgcgataccaggtcccggtggcacatccacccgccagaacaattcccagcccgaagatatacccacctataacagtaccaagccacgggaacgccccggcttcgtaagtcagtaggcccgcctgaattaacgcaaaaacccccacgctttgtaccgaaattgcaatcagcaaggcgtaaaacatgcgattatttttcacgatatacatatcgcgaaaaccacctgtcaggcaaaaacgcccacgctgcatgacaaatcccagcagagcaccacaaattagcccgcttaatatcattgaaaacataaattaattaaccagatgaatgttaatgaggaaattattcatgactggtggaatgcagaccaataaccaaattctctaaattagaacaaatggttattaatgaggagttcgatacaaaagaataaaaaaaccggagccaaatgttcattcgactccggtttattattagaaaagatgattatgctacgtcttcgtactgcggaaccggattacggaagctcttggtgacgcaagccaggtaaatcagaccgatagcagcccagatcagacccagaaccattgagctttcttccaggttaacccacagcgcaccaacggtcagcgcaccacacatcggcaggaacagatactggaagtgatctttcagcgtcttgttacgcttctcacggatccagaactgcgagatgaccgacaggttaacgaaagtgaacgccaccagcgcaccaaagttaatcagcgccgttgccattaccaggtcgaagttgattgccagcagggcaatcgcgccaaccaggatgatgttcatcgccggagtacgccatttcgggtgtacataaccgaagaagcttttcgggaatacgccgtcacgacccattacgtacatcagacgcgctacgcctgcatgcgccgccataccggacgccagtacggtaatggtggagaagatcagcgcgccaacctggaacgctttacccgcaacgtacagcatgatttcaggctgtgacgcatccggatctttaaagcgagagatatccgggaagtacagctgcaggaagtaagttgcaaagatgaagatcatgccgccgatcagcgcggtcaggaaaatcgcacgcgggatcacgcgctctgcatctttggtttcttccgacaggttgctgatgccgtcaaagccggtaaaggagaagcacaggattgtcgccccggtaatcatcgggataacatgcgcatcgccagaccagaatggacgagtgctcgccagcgtaccagcgccttcaccttcaaatacgccataaacaaccatgcccagaatcaccgcgatcagcactacctgcaacacgacgattacagtgttgaagttcgctacggatttcagactacgcaggttaaaggcggtcataaaggccaccagcgccaccacaaacatccacgatgggatggaaggcaccagagcttcaaaatagattttcgccagtagaatgttgatcatcggcgcgaacagatagtcgagcagagaagaccaacccaccataaagccgacagtcgggctaatggatttctgggcgtaagtgtatgcagagccagcagaaggatagcggcgaaccagcttcccgtagctcagagccgtaaacaggatcgcaatcaatgcgaacgcataggctgtcggcacatgaccatccgtgaggcctgaaacgataccaaaagtatcaaacagcgtcatcggctgcatataggcaagacccatcattacaaccggaactaacgtaagcgttttacgcaattccacgcgagaggtgtttggagtaacgttatgcgacatggtcattctcctttacggtgataaccgtcgcgtaagcaaaaaattgccccatttttttggattcctcagcgacaacaactgtcgatttttagtaaatatctatccggtacgaagcccggcctcttggtatgaatgattggtttgaagcaaaaaataaccgacgctgatgaaacgtcggtttttagtcattttttgacagcggcgcattgtgcctaaatgggggggaaatgacaagagaatgagaggcttgtcagaataatttttctttaaatggctgattttccgtcatcagattttgcataaacaccggcgatcgcactatttgctaaaatttcatcccgccaccagccactggcaagtcctgcggtctgttcgttccagccaatccagacgggttcaaagagagtttgggcgaccactttcttctcgattaacgcgccactatcgagaaaacgttgcgccagataacggggtaaatagccgcagccgaggccgctaatttgcagctccagtttggttttaaaatcgaaaacggtaatggcttcttgttcgtcgagaagttgtgatgccgtagaagcgcctgcctgcgcagtatcccccaccacaatcgcccgatatcgcttaataatacgacgatttaacggctcttcttccagggctaacggatgatgaggcgcgaccgcaaagacttgttccagatcgcccaaccgtgaaaaaccaaactcactggaagatggtggctcatgcatcgcgccaacaataatatccgctcgcccctgagtcagggcatcccatgaaccaccgagtacgccattgataaacttcaggcgcgtcacgctatgatgttgataaaaagcttcaatgagtggcgcaagcagagaaaaaggaaacgtgtcgtccacgccaatcaccagctcgttttcccagccttcatgcagtttgatcgcctgcttttccagttcccgcacggtatgcagaacttcccgccctttctctaataacatttttccggtgcgggtgaatttagcgcggtgtccgctacgatcaagcaattgaatattaaggtcgctttccagcttgtgaacggtgtaactcagagcggacggcgtcttgtagagtttggccgacgccgccgcaaaactgccttctttttctaaggcatcgaggatcatcaacacatccagcagtggtttcatacacgcccccttgcagtgcatgcggcgtcctgctggcgtgatcgtttactccagcggcattaccagcggatcgggatactggtattcaaatcccagttcattacaaatccgactgccatcaataatcttacctttgccgctgtccagactatttctgaactgcggaggttccagccccagtaaacgggccatctgcggatagaaaacattacgcgcagggtgagctggcgcacatatattatagatgtgtccgcctttaggtgcctgtaacaacagagtgatagcgccaataacatcttctaaatggactaaattaacaccatgttcaccatcaggcgcggtttttccggcaaagaagcgtccgggatgacgtcccggtccgaccaggcccgcaagacgcagaatatcgaccgaagtaccgggtaaattgtgcagccagtcttcgagttcttctaatactcgtccactgttggttactggattacgcggggtggtttctttcaccgtgccttgcgcgtcgccatagacagatgttgagctggtaaaaataatgcggggaatacgatgggccagcgcgctatccactaactcttgtaccgcttgtaaatagaactcatcgccggggccgctacgacgtgccggaagcgtaatgaccagcgcatcggcatccatcagggcatccagatcgtcagaatcgcaaactagctcaggctccatgcgaagcagatagctatcaatgccactcattcgggccgcttcgacaccatcttgtgtggttttactcccggtgacttgccagcctcgcgctgaaagtgacatcgccagcggcatgcctaaccaccctaacccgacaattgcgacctttttcatccgttatctcctgatacaccttagatctataaggctacgctagcgtatcaaaactgacaattcattctatgaatgaatctgttcaataatgataacgacatgctgcaatgagcagtgaatcgtcggtaaccgcgtataccagacggtgctcctctgtaatgcgtcgggaccagaaacctgacaaattatgtttcaggggttctggcttccccttaccttcaaatggcgttctgcgggtatctttgataagttcattgatctttttaacaattcgcttatctgtttcctgccagtacagataatcgtcccatgattcctcagaccagattagtttcactcaatgatgtccttttccgttcctttgcctgatttcaggctatcgattgagtccatcaatctccgggcgttagcgggggagcgcagtagataagccgtctcttccagcgagttgtattcttcgagtgacatcagaacacaagcctctccattctgacgagtaataaggatcggggcatgatcttcaacggctttcatcattgttgccgacaaattctgacgcgcttcgctgtagctaattgtacgcatgtcaatctcctcttttgtacagttcattgtacaatgatgagcgttaattaactatttattaattagtttgtagatcaaggtattgtcagtgagacgaaaatccaggcttcgctatttttggtgccatcagctaagaggacagtcctcttagccccctcctttccccgctcattcattaaacaaatccattgccataaaatatataaaaaagcccttgctttctaacgtgaaagtggtttaggttaaaagacatcagttgaataaacattcacagagacttttatgacacgcgttcaatttaaacaccaccatcatcaccatcatcctgactagtctttcaggcgatgtgtgctggaagacattcagatcttccagtggtgcatgaacgcatgagaaagcccccggaagatcaccttccgggggcttttttattgcgcggttgataacggttcagacaggtttaaagaggaataacaaaatgacagacaacactcgtttacgcatagctatgcagaaatccggccgtttaagtgatgactcacgcgaattgctggcgcgctgtggcattaaaattaatcttcacacccagcgcctgatcgcgatggcagaaaacatgccgattgatattctgcgcgtgcgtgacgacgacattcccggtctggtaatggatggcgtggtagaccttgggattatcggcgaaaacgtgctggaagaagagctgcttaaccgccgcgcccagggtgaagatccacgctactttaccctgcgtcgtctggatttcggcggctgtcgtctttcgctggcaacgccggttgatgaagcctgggacggtccgctctccttaaacggtaaacgtatcgccacctcttatcctcacctgctcaagcgttatctcgaccagaaaggcatctcttttaaatcctgcttactgaacggttctgttgaagtcgccccgcgtgccggactggcggatgcgatttgcgatctggtttccaccggtgccacgctggaagctaacggcctgcgcgaagtcgaagttatctatcgctcgaaagcctgcctgattcaacgcgatggcgaaatggaagaatccaaacagcaactgatcgacaaactgctgacccgtattcagggtgtgatccaggcgcgcgaatcaaaatacatcatgatgcacgcaccgaccgaacgtctggatgaagtcatcgccctgctgccaggtgccgaacgcccaactattctgccgctggcgggtgaccaacagcgcgtagcgatgcacatggtcagcagcgaaaccctgttctgggaaaccatggaaaaactgaaagcgctgggtgccagttcaattctggtcctgccgattgagaagatgatggagtgatcgccatgagctttaacacaatcattgactggaatagctgtactgcggagcaacaacgccagctgttaatgcgcccggcgatttccgcctctgaaagcattacccgcactgttaacgatattctcgataacgtgaaagcacgcggcgatgaggccctgcgggaatacagcgcgaagtttgataaaaccacggttaccgcgctgaaggtgtctgcagaggagatcgccgccgccagcgaacgcctgagcgacgagctaaaacaggcgatggcggtggcagtaaagaatattgaaaccttccacactgcgcaaaaactgccgccggtagatgtagaaacgcagccaggcgtgcgttgccagcaggtcacgcgtccggtagcttcagttgggttgtatattcctggcggctccgccccgctcttctcaacggtattaatgctggcgactccggcgagtattgcgggctgtaaaaaagtggtgctgtgctcaccgccgccgattgccgatgagatcctttatgcggcgcagctgtgcggtgtgcaggacgtgtttaacgtcggcggcgcacaggccattgccgcactggcgtttggtacggaatctgtgccaaaagtggacaaaatcttcgggccgggtaacgcctttgtcaccgaagcgaaacgtcaggtgagccagcgtctggacggtgcggcgatcgatatgcccgcaggcccgtcggaagtgctggtgattgctgacagcggcgctacgccggatttcgtggcttctgatttgctctctcaggctgaacacggcccggactcacaggtgattttactgacgcccgctgctgatatggcgcgtcgcgttgccgaggccgtcgaacgccaactggcagaactgccgcgtgccgaaaccgcccgccaggcactgaacgccagccgcctgatcgtgactaaagatttagcgcagtgcgtggagatctccaaccagtacggcccggagcacctgatcattcagacccgcaacgcccgtgaactggtcgatagcatcaccagcgccggttcggtatttcttggtgactggtcaccggaatcggcaggtgattacgcctccggcaccaaccacgttctaccgacttacggttacaccgccacctgttccagcctcgggctggcagatttccagaagcgcatgaccgtacaggaactgtcgaaagaggggttctccgcgctggcttcaaccatagaaacactggccgccgccgagcgcctgaccgcccacaaaaatgccgttactttgcgtgttaacgcccttaaggagcaagcatgagcaccgtgactattaccgatttagcgcgtgaaaacgtccgcaacctgacgccgtatcagtcggcgcgtcgtctgggcggtaacggcgatgtctggctgaacgccaacgaataccccactgccgtggagtttcagcttactcagcaaacgctcaaccgctacccggaatgccagccgaaagcggtgattgaaaattacgcgcaatatgcaggcgtaaaaccggagcaggtgctggtcagccgtggcgcggacgaaggtattgaactgctgattcgcgctttttgcgaaccgggtaaagacgccatcctctactgcccgccaacgtacggcatgtacagcgtcagcgccgaaacgattggcgtcgagtgccgcacagtgccgacgctggacaactggcaactggacttacagggcatttccgacaagctggacggcgtaaaagtggtttatgtttgcagccccaataacccgaccgggcaactgatcaatccgcaggattttcgcaccctgctggagttaacccgcggtaaggcgattgtggttgccgatgaagcctatatcgagttttgcccgcaggcatcgctggctggctggctggcggaatatccgcacctggctattttacgcacactgtcgaaagcttttgctctggcggggcttcgttgcggatttacgctggcaaacgaagaagtcatcaacctgctgatgaaagtgatcgccccctacccgctctcgacgccggttgccgacattgcggcccaggcgttaagcccacagggaatcgtcgccatgcgcgaacgggtagcgcaaattattgcagaacgcgaatacctgattgccgcactgaaagagatcccctgcgtagagcaggttttcgactctgaaaccaactacattctggcgcgctttaaagcctccagtgcggtgtttaaatctttgtgggatcagggcattatcttacgtgatcagaataaacaaccctctttaagcggctgcctgcgaattaccgtcggaacccgtgaagaaagccagcgcgtcattgacgccttacgtgcggagcaagtttgatgagtcagaagtatctttttatcgatcgcgatggaaccctgattagcgaaccgccgagtgattttcaggtggaccgttttgataaactcgcctttgaaccgggcgtgatcccggaactgctgaagctgcaaaaagcgggctacaagctggtgatgatcactaatcaggatggtcttggaacacaaagtttcccacaggcggatttcgatggcccgcacaacctgatgatgcagatcttcacctcgcaaggcgtacagtttgatgaagtgctgatttgtccgcacctgcccgccgatgagtgcgactgccgtaagccgaaagtaaaactggtggaacgttatctggctgagcaagcgatggatcgcgctaacagttatgtgattggcgatcgcgcgaccgacattcaactggcggaaaacatgggcattactggtttacgctacgaccgcgaaaccctgaactggccaatgattggcgagcaactcaccagacgtgaccgttacgctcacgtagtgcgtaataccaaagagacgcagattgacgttcaggtgtggctggatcgtgaaggtggcagcaagattaacaccggcgttggcttctttgatcatatgctggatcagatcgctacccacggcggtttccgcatggaaatcaacgtcaaaggcgacctctatatcgacgatcaccacaccgtcgaagataccggcctggcgctgggcgaagcgctaaaaatcgccctcggagacaaacgcggtatttgccgctttggttttgtgctaccgatggacgaatgccttgcccgctgcgcgctggatatctctggtcgcccgcacctggaatataaagccgagtttacctaccagcgcgtgggcgatctcagcaccgaaatgatcgagcacttcttccgttcgctctcatacaccatgggcgtgacgctacacctgaaaaccaaaggtaaaaacgatcatcaccgtgtagagagtctgttcaaagcctttggtcgcaccctgcgccaggccatccgcgtggaaggcgataccctgccctcgtcgaaaggagtgctgtaatgaacgtggtgatccttgataccggctgcgccaacctgaactcggtgaagtctgccattgcgcgtcacggttatgaacccaaagtcagccgtgacccggacgtcgtgttgctggccgataaactgtttttacccggcgttggcactgcgcaagcggcgatggatcaggtacgtgagcgcgagctgtttgatctcatcaaagcctgtacccaaccggtgctgggcatctgcttagggatgcaactgctggggcggcgcagcgaagagagcaacggcgtcgacttgctgggcatcatcgacgaagacgtgccgaaaatgaccgactttggtctgccactgccacatatgggctggaaccgcgtttacccgcaggcaggcaaccgcctgtttcaggggattgaagacggcgcgtacttttactttgttcacagctacgcaatgccggtcaatccgtggaccatcgcccagtgtaattacggcgaaccgttcaccgcggcggtacaaaaagataacttctacggcgtgcagttccacccggagcgttctggtgccgctggtgctaagttgctgaaaaacttcctggagatgtgatgattattccggcattagatttaatcgacggcactgtggtgcgtctccatcagggcgattacggcaaacagcgcgattacggtaacgacccgctgccgcgattgcaggattacgccgcgcagggtgccgaagtgctgcacctggtggatctgaccggggcaaaagatccggctaaacgtcaaatcccgctgattaaaaccctggtcgcgggcgttaacgttccggtgcaggttggcggcggcgtgcgtagcgaagaagatgtggcggcgttactggaagcgggcgttgcgcgcgtagtggtcggctccaccgcggtgaaatcacaagatatggtgaaaggctggtttgaacgcttcggtgccgatgccttagtgctggcgctggatgtccgtattgacgagcaaggcaacaagcaggtggcagtcagcggctggcaagagaactcgggcgtttcactggaacaactggtggaaacctatctgcccgtcggcctgaaacatgtgctgtgtaccgatatctcgcgcgacggcacgctggcaggctctaacgtctctttatatgaagaagtgtgcgccagatatccgcaggtggcatttcagtcctccggcggtattggcgacattgatgatgtggcggccctgcgtggcactggtgtgcgcggcgtaatagttggtcgggcattactggaaggtaaattcaccgtgaaggaggccatcgcatgctggcaaaacgcataatcccatgtctcgacgttcgtgatggtcaggtggtgaaaggcgtacagtttcgcaaccatgaaatcattggcgatatcgtgccgctggcaaaacgctacgctgaagaaggcgctgacgaactggtgttctacgatatcaccgcttccagcgatggccgtgtggtagataaaagctgggtatctcgcgtggcggaagtgatcgacattccgttttgtgtggcgggtgggattaagtctctggaagatgccgcgaaaattctttcctttggcgcggataaaatttccatcaactctcctgcgctggcagacccaacattaattactcgcctggccgatcgctttggcgtgcagtgtattgtggtcggtattgatacctggtacgacgccgaaaccggtaaatatcatgtgaatcaatataccggcgatgaaagccgcacccgcgtcactcaatgggaaacgctcgactgggtacaggaagtgcaaaaacgcggtgccggagaaatcgtcctcaatatgatgaatcaggacggcgtgcgtaacggttacgacctcgaacaactgaaaaaagtgcgtgaagtttgccacgtcccgctgattgcctccggtggcgcgggcaccatggaacacttcctcgaagccttccgcgatgccgacgttgacggcgcgctggcagcttccgtattccacaaacaaataatcaatattggtgaattaaaagcgtacctggcaacacagggcgtggagatcaggatatgttaacagaacaacaacgtcgcgaactggactgggaaaaaaccgacggacttatgccggtgattgtgcaacacgcggtatccggcgaagtgctaatgctgggctatatgaacccggaagccttagacaaaaccctcgaaagcggcaaagtcaccttcttctcgcgcactaaacagcgactgtggaccaaaggcgaaacgtcgggcaatttcctcaacgtagtgagtattgccccggactgcgacaacgacacgttactggtgctggcgaatcccatcggcccgacctgccacaaaggcaccagcagttgcttcggcgacaccgctcaccagtggctgttcctgtatcaactggaacaactgctcgccgagcgcaaatctgccgatccggaaacctcctacaccgccaaactgtatgccagcggcaccaaacgcattgcgcagaaagtgggtgaagaaggcgtggaaaccgcgctggcagcaacggtacatgaccgctttgagctgaccaacgaggcgtctgatttgatgtatcacctgctggtgttgttgcaggatcaggggctggatttaacgacggtaattgagaacctgcgtaaacggcatcagtgagttgcggggtaagcggatgcgatattgttgccgcatccggcaaaaaaacgggcaaggtgtcaccaccctgccctttttctttaaaaccgaaaagattacttcgcgttgtaattgcgtagagcattacgccccagcacaatccccgcgccaaccatgccacccagcagcaccgccagaatcaaggtaattgcctttttcgggctatcacgacgaataggtaacatcggtttcatcacataacggtaagcatgaatatcaagatcatcaacttttaagctttcgatatccagcaggttttgacgagtctgatagtagtttggcgagaacaccaacggacgggtcgcctcatgcttaatcatcgactccagcgcttcgctccccaaaaggaacaacgtatcttgtgtgatatcttcgccagtctgttgaatctgcggttttgtcacctgcgcctgattcgcatactgcaacgcttcctgaatctgacggatacgcagatctttctgctcctgcgcgactacttcctgcgttcttaaagagtcctgcaagtttttccgtcccagagcaatgttgtctttgagatccttttctagctcttgattcactttatcgtcaacttgctgaatgtattgggccaacttcatttgtgcgccctctgcagtttgcccaacataagaaacagtcaatggtaattgctggttcttaacagaaggttcgatggtaagtttttctcgttcttcctgattatccagcgtttctgctaatgcagagaaggcagaactgaagcgaccaattaacgtctcctgcaaatccgatactttcggtgcagcctgaccatagataacattcatggcattgttatagccagcaatttgccccacgtcgggctgagtgataattgctgttgacgtccatttctccttcgctactgccaaatatccaatagccagggcaatagccacaatgacggaaatgatgattgtcatcttgccacgccacaactgcactagtaaatcaatcaaatcaatctgttccgggtcatggttttgcccagaaacattattattttctactctcatcattaccctaactgacggaaatttccaagtccgcatagtttagcgataatcctcgtgaatgctataggataagtgataaaaataatgaattgttgtgtaagtaacaaaagacaatcagggcgtaaatagccctgataacaagatgttagtcgctgccaaagagatcgcgggtgtataccttatctgccacatccttaagctcttctgccattcggttagagataatgacgtcggcttgttgtttgaaggtggcgagatcacgttccaggcgagagttgaagaatgagtcttctttcatcactggctcgtagatgatcacttcaacacctttcgccttgatacgtttcataatcccctgaatagaagacgcacggaagttatctgaaccgctcttcataatcagacgataaatacccaccacttgcggcttgcgtgacaaaatggcatcggcaataaaatctttacgcgtgcggttagcatcgacaattgccgagatcaggttattcggcacagactggtagttcgccagtaactgcttggtatctttcggcagacaataaccaccataaccaaacgacggattgttgtaatggttgccaatacgtgggtcgagacaaacgccttcgattatttgacgggaattcagacctaaactttctgcatagctatccagttcgttaaagtacgccacgcgcatcgccaggtaggtgtttgcaaaaagtttaatcgcttctgcttcagtggagtcggtaaacagcatcgggatattttgcttaatcgcgccttcctgtaacagagcagcgaaacgttctgcgcgttctgaacgctcaccgatgacaatacgtgaaggatggagattatcgtaaagggctttaccctcacggagaaattccggggagaatataatattttcagtgcgatatttcttatgcatcgctgcggtaaaaccaacgggaaccgttgatttgatgaccataaccgcataaggatttatctcaactacgtctttaattactgattctacactggatgtattgaaataattagttttaggatcatagtcggttggagtggcgatgatgacataatcagcatcccggtaggcttcatttttatctaatgtggcattaaagtgtattttatctgattgcaaaaactgctgaatttccttatcaacaataggagatatccgatcattcagcatagcaacgcgtgacggtaaaatatctaatgccacaacctcatgattttgtgcgattagaagcccgtttgacaagcctacatagccagtaccggaaatggtgattttcatttcatgctctcagaattaacttaactgtgaatcatgatgtttttagcatcctgataagagctaaaagttttaacgctacgttgttcgatggtcaacgcaacgaaaaacaattcagattttctttataagaatagctgatatttattaagttaatattaagcagtgaaatttagtctataagatatttggcaaaaaaaagcccggtgcaatatacgccgggcctcaattttattgttggttaaatcagattaatccagccattcggtatggaacacaccttctttatcaatacgcttataagtatgcgcaccaaaatagtcacgctgtgcctggatcaggttcgcaggcagaacagcagcacggtagctgtcgtaataggcaaccgctgcggagaaggtcggaaccggaataccgttctgtactgcataagcaacgacatcacgcagcgcctgctggtagtcatcggcaatttgcttgaagtacggagccagcaacaggttagcgatctgtggattttcggcataagcatcggtgattttctgcaggaactgcgcacggatgatgcagccagcacggaaaatcttcgcgatttcgccgtagttcagatcccagttgtactcttcagacgcagcacgcagctgagagaagccctgggcgtaagaaacgattttgcccagatacagcgcacgacgaactttttcgatgaactcagccttgtcgcctgctggctgtgcttgcggaccagagagaactttagatgcggcaacacgctgatctttcagagaagagatataacgtgcaaacacagactcggtaatcagcgacagcggttcgccgagatccagcgcgctctggctggtccatttaccggtacctttgttagccgcttcatccaggatcacatcaaccaggtagttaccgtcttcatcttttttggtgaagatatctttggtgatgtcgatcaggtaactgctcagttcaccgttattccactcggtaaaggtctgcgccagttcttcgttggtgaggttcaggccacctttaagcagagaataggcttcagcaatcagctgcatatcgccgtattcaataccgttgtgaaccatcttcacatagtgacctgcgccatcggcaccaatataggtaacgcatggttcaccgtcttcagctacggcggcgattttggtcaggatcggtgctaccaattcataggcttctttctggccaccaggcataatagaaggacctttcagcgccccctcttcaccgccagaaacaccggtaccgatgaagttaaagccctctgctgaaagctcacgattacgacgaatagtgtcctggaagaaggtgttaccaccatcaatgatgatgtctcctttatcgagatatggtttgagggaatcaatagcagcatccgtgcctgcacctgctttcaccattaacaggatgcgacgaggcgtttccagagattcgacaaactctttcaccgtatagtaaggaaccagtttcttgcctggattttcggcaatcacttcttccgtcttctcacgggaacggttgaaaatagagacggtataaccacggctttcgatgttgagcgcaaggttgcgtcccatcactgccataccgactacgccgatctgttgcttggacattacatactcctgtcaggtgtgatcaccgcgctgaatgctcgcggcctggaatgttcgcaaataagtatacaaagtacttattaaagtataaatagcttatccatgcttatatgcttacggctttatattacgggtgaaaaactgatgaaattcgatcaaagttgcgatttgataaaatacgttttctggctaaatatctaaaagtactttttaagtgccatctgaaggcttttgaaaaaaaacttcgattgtcatgatgagcataatgtatcgcatgaaaagcgggaacataatgaagtctgacaccagccaggctaagcctcaagcacaggtcaatatcttcacagtacataaagtaaccttgatcgaagccatttacacgcacaaaatctgaaaaacgtaccagcataaatgatcctgcgcaccaatcaacaaccgtatcagaatagatactttctttaggaatttttgttttattaaggaaggtgcgaataagcggggaaattcttctcggctgactcagtcatttcatttcttcatgtttgagccgattttttctcccgtaaatgccttgaatcagcctatttagaccgtttcttcgccatttaaggcgttatccccagtttttagtgagatctctcccactgacgtatcatttggtccgcccgaaacaggttggccagcgtgaataacatcgccagttggttatcgtttttcagcaaccccttgtatctggctttcacgaagccgaactgtcgcttgatgatgcgaaatgggtgctccaccctggcccggatgctggctttcatgtattcgatgttgatggccgttttgttcttgcgtggatgctgtttcaaggttcttaccttgccggggcgctcggcgatcagccagtccacatccacctcggccagctcctcgcgctgtggcgccccttggtagccggcatcggctgagacaaattgctcctctccatgcagcagattacccagctgattgaggtcatgctcgttggccgcggtggtgaccaggctgtgggtcaggccactcttggcatcgacaccaatgtgggccttcatgccaaagtgccactgattgcctttcttggtctgatgcatctccggatcgcgttgctgctctttgttcttggtcgagctgggtgcctcaatgatggtggcatcgaccaaggtgccttgagtcatcatgacgcctgcttcggccagccagcgattgatggtcttgaacaattggcgggccagttgatgctgctccagcaggtggcggaaattcatgatggtggtgcggtccggcaaggcgctatccagggataaccgggcaaacagacgcatggaggcgatttcgtacagagcatcttccatcgcgccatcgctcaggttgtaccaatgctgcatgcagtgaatgcgtagcatggtttccagcggataaggtcgccggccattaccagccttggggtaaaacggctcgatgacttccaccatgttttgccatggcagaatctgctccatgcgggacaagaaaatctcttttctggtctgacggcgcttactgctgaattcactgtcggcgaaggtaagttgatgactcatgatgaaccctgttctatggctccagatgacaaacatgatctcatatcagggacttgttcgcaccttccttaatccctaacataaatgacacaataaaatcagaaagcacaggaaattttcttacggaataatcatgtaaagatttcgcttcatctcggaacaggcataatgtactaaaagcataacgcttactttcgacatatttaatatatgtcagcaaatcatcatgcttcatgatgatatcgggattcaaaaacaaaatgtaatcatcatctgcgggtctatatttttcctttacatacgccaccgcaatattattattatgaccaaagccgtatacacctccactaatatagtccaggcctgcataatgctggcatatttgtttcaataatagagagtctttgttgtcgcgtacgataatcttgtagtgctcatcgtcagcattaagattttcgagtaattttttgatgtagtcttcatgtccgtgggaaacgattattatatataccatttcaatgttcttcagtaataaaattaactagttcatcaaacccaactaatacattttcattacgataaatgaaatttgcatcagagatatcttttttgaggttaccttttttgaagtcaataataagtttaactaacatgtcatcgttattagaatcaaaaaaagctttcttttcataactaccaagagtttctctagtaaatgggaaatctgatgctaatacccacttacctcgctctttagcttcagacaacggcaatccccatgtttctaacctagagggaaaacaaactatatctgaaatattataacaatgatcgattttttctttatccaagtacccgaggaaatgaacattatccagtccttctgcaagactgataatatattttgcatacgcattttctgtaccactgatagtaagcagaaatttaatattggattgttctttcaatttccttgctgcactaataataagctcgtaatttttaaatactcgtggaacagcagggtaaaatattgtcaactcagaagggttattcttaaattgagaatcatcatcagtaagttggcttttatcagataatttaatttctggccgactgacaatgatgttatttatagaatatttcttgataaatttttctttcatccagaattgttgaacaaacactgcagtattttttttaatgtttattttatatatcagcccgtatagcattttaaataagaaaaagctaggctccataagaatttcacggaataaaattcctttataaaaaggtgcagggttatgacaatacacatatctttttttagtgacgacattggccgtaatatcatgcagacaaatccaatgcgtagcattcagctcttttgaaagttttttacaaactacatattcaaagtgcaaacgttttagccacgaccctttaacctcaggaaactcaatgaatttaacccatggataactttcttttaactctttagcagaatggactaatgcgataaaactgacattttctttattattagttgctgccaaaaattttttcaaaatggtaaatggaccgccagtggtaaaattgaccgcagaaacaacgactatgctttttcccataatttggtctcatgattgtatttctttatgatttttgctggtactcccgcaatgacagtattttcgggaatagaacctctaacaacagaattggcgccgactacgactccattaccaataattgttccaggcaaaaccgtcacattctcacccaaccaaaccctctggccaattacaacagctgaagattccaacgtgcgcatgtctggaggtatatttggcgaactcattggatcagagtgcttaaaggaaccgtgattatgatcggtaataaatactttacttgcaataagcgtatcccgacctatcgtaacgctctcaattgaggcgatatgaacatagtcgttaacttgcacattatcggaaaaaaaaatcacgccacgtccaaatgcatccagcctgagaccgactccacttgtgaaattttcaccaaaattaatgctaccatcattgcgaatatagcagggaaatcgaataattctacagttccggtaaaatacacgagtcaataagacatctctaacaagccgaataaaaccacagagaccatatcgtttagcgagttttaagatcatcgatcacctcttcaagaacatccctgaagtaacttcctgttcgaattttctgagaaataatttttgtattctcactaatttgcttataagtttctattgtcatggagtcaacaatctcttgcatttctttgattgatcccactgcatatcctattctattatctacaatgaaatccgcaagggcggctttatcccatataaatactggaagttccattgaaagataaagagatgtcttatgagggttattaaactttaaatagtcgccaaaggcaccactacaggtttcgacagaatctccatcccaaatgagtccaaattgcatgcctgggaggttaatcttttccggagattgagcatcaaaacttccaagatatttaggattatctttattttcatagttgacaccaaagagagtaaaatcgcatccttcagtatatatgaaagaacatttatgcctagaaaggttgccagcatatatgacccctcgttgcttatccgtaacatctcgatgctccacatcagatgagacgaggtaatcaaatatttttatgtctttgattttatcctgagacatatatttactaaggtactttgtcatttgtggattgtgacttatgaccatatcacaggtagcaagccgcacagaatcactaccccctcctcctcttaattcatcaatatcatgaatcagaggtactattctaaattttagaaggcggtgaaagaatgacaatatatgccaaaatggtttggccatcgggaaattgaaaattaaaacatctttattttcaagaccgcagagaaatgtactaagcttaacagaactaataattctctggactactccaccccatagaggaatgttaacaacagaaatgttttcataatctgaagcaatgtccagtgcatcttttcttgctttaaatccagcatcgcgtctagagaaatttaaatcattcaaaaaatacattttcactttattttctgggccttaagaaattgagagaatactatgatacaaagagttatttgtatccaactgctaatattagtcatgaagctttcatgataaaaaatgaaagaaaaggtataaataaaatatgaataaaatattttcacagatatgtaatttcgagacaatctccataaaacacctgaaatacagccatgaataaccatcatcaaatagcttagctccgcggaaatataaacataatccgaaaaagcagtataaacatttgttggcaaacccacccacacaaattctttatgcaacgacatagagactccacctgttaatagccccatcagcctttcaaaaaaccaaaagacatgagaactggcagagttagatacttgctgaaaataaaactcctgaaacgcgattatagggctgaccaaatacatggatagataatatgccatccccccaggcagtccacgtaaaaagagcatatacaaggagaatagaacacctacagctgtaataagataaacataatgttttactctattaacacctacgatgaatgcataagagatgataaccataaagacaatttgcttaccagtattcagtataattgcaaagatgaatacaataaaaacaagtaaagtaaatgttttacttacctttgtattagtaaattttttagaccaaataaataaagcaaaagtagttagaatgattggctgcatgtatgctgagaaatttcttgatgtgtcttcaacatcagcatctcttatcaaattcatatagctaagtaagctagtcccgaactggtagttacttaacctcatgcatatatatatcatcgaaaaagaaataactaacaagcctacattatgcactttcttcgatggtatgctataaatagcattattgacttttctgatatttagatctaatacactttccgtcaataaacatgacagggtaaatgtcaaaacattgcaaagtagaaaaatcaacgtagcgtcatttaactgaaaagcatatatatctgacgttatttcatatcccaataagaccagtgcgaagatgatattaacgcatacggctggataaaatatatccttcttaagatataaacagataaatgctgtaatgagaaagacactaattacaagatagatcattaatccgtactcattatatttttcacttgataaagagcggcagatatcacttgatgcatatcataatatttatactcggccaaacgcccgccaaatataaccttgtcttctctgctagctaactctctatatttcttaaaaagctccatgtttttattatcattaactggatagtagggttcgtcgccaactttccactctaatggatattcttttgtaacaaccgtatgctttgtctcaacatagtcaaaatgtttatgctcaattattctggtatatggtacattagcatcagtgaaatttattactgcattcccttggaagtttggaaattcatggcgttccgtctcaaattttaaagagcgatattctaacgctccaaacctatagtcgaagtactgatcaatgggtccagtgtagatgattctatgggctttactcgctagagaatctttgtctttcaaaaaatcaatgcctaattttacgtccacaccttcaagcattttttcaataagcttagtgtagcctcccaccggaataccttgatagcgatcggaaaaataattgttatcaaacgtaaatctcactgggattcgcttaataataaatgcaggcaattcttttgcacttcttccccactgcttctccgtataaccctttatcaatgcttggtataagtcctccccaactaatgaaatcgcctgctcctccaaattttcaggtaccttgtcaccatacttttttttctgagcattaatgatattttgagcttcttgaggatctttaactccccacatttggtggaaagtattcatattaaaaggaaggttgaataatttgtctttataaatcgccagtggagaattagtaaaacgattaaattctactaaatcattaacgtaatcccatatatatttatcattggtatgaaaaatatgtgcaccatatttatgaatctggataccctcacagtcctctgtgtacgcatttccaccgatatgatttcttttctcaatcactaaaacttttttgtttagcttttttaactcattcgcacaaacggcaccaaacaaaccagaaccaacaatgatataatcgtacataaaatcctcagcaaaccagtaatttattatttcttacgaacatcagcatgagtgacgtaactaagcactctgttgcaagcaatgttattgctgcaccaatctctttaaaaagagttgttagcggaaaaatcaacaacaaactcaacaaacccgcagcgattaaaatcttactgaattctttcttataattatgggtcagcataacttgaatgccatagacattacttaatgaaataagaaaaggcagaggcgatataatcattagcacaatcactgcattatcatatcccggccctatacttatttttactagtatagatgcacccaagagcagaattaatgaaaaagcaccaccaatcaaactcaagcaggtcaatgattttttaattaaaatcacacccttcacacgattaagaacaagcgtacttgatattcttgggtatattgcttgggtgataggatttaatagcccttgaagcgcgtttcttatagtattggccgcattaaaattccctacggacgttggtccagatataaatcccaggataataactattcccgtagaatataaactaatagcagatgtggaaataaaaacatgaaaaccgtctgctaaagatcgacgcacattatgtaatgatagcgtaactttaccaatccaaccttcatgaacaacgatagctagtgcaataattccagcaaccagatttgcacttgactgaataaaaccggcaattgctatatctgactttgtgttcacaaaaataaatgttagagggataatagccaagcgggataaaatactacttaaagtcagccatttcattttttcttttccctgaaacagccagatagggtagattaaattcccgactaatgcaggaacaaacgaccatataattacggcatgcttgttatattcaggaacaagcaaggtcatcgacgttaagaaaatcaatgtaatgacgataagaactatttttgaaaatatcaccgcccaaaaaatagacgttactttatctttactatctgctgctttggcaatactctgagttgctgtgagattgaaaccatattcaacaaacattatcatatatagcatagtcgcttggcaaaaaccgaatataccgaaattttcaggaccaagtgttcttacaagatatggaaatgtaagcaatggtaaaagataattgctaccttgaacgacagccagatatataacgtttcttcttaaagataatttattcgtattcatgcaattaattttaatctgataagctcatctaacgtaaagagcctttcatcttttggcgaaaggattaaccctgatgtttggggccaatcaattgcaatgcgttcatcattccaacatattccacaatcgctttcaggatgataatagtttgtagttttatattgaaattcagcgatatcagacagaaccaaaaagccatgagcaaacccttttggtatccacaactgctgcttattatcagctgaaagcagaacaccaacccatttaccaaaggataccgaattgggtcgaatatcaacagcaacatcaaaaactgctccatgagtgcagcgtacaagtttatcttgtgcgtactcgccgcgttgaaagtgaaggcctctgagtacattttttgatgaacgtgagtgattgtcttgaacaaagctgaccggatagcctagaatatgttcaaatgctgattgattaaagctctcataaaagaaacctctatcatcaccaaatactcttggctccagaattagcacatcttcaatttcagttctaatcacattcattaatttgaatccttcgtcattttataaagatactgcccataattattctttattagtggtacagctaattttcttacttgctcaacatcaataaaacctttacgaaatgcaatctcttcaggacaggaaaccttcaatccctggcgctcttcaattgtcgcaataaaattacttgcttctatcagactctgatgagtccccgtgtccagccacgcgtagccacgccccatcatcgcgacagacagacgtccctgctcaagataaatacggttaatatctgtaatttctaactcaccacgtgcagacggcttcaagtttttcgccatctgaaccacgtcgttatcataaaagtacagacctgtaacggcgtaattactctttggttctaacggtttttcttccagactgattgccgtaccgtttttatcaaactcaacgacaccatagcgttctggatcattaacgtgataggcaaataccgttgcaccactttctttgttaacagcggcctccattagcttcggcagatcgtgaccgtaaaagatattatcaccaagaaccaaagcacaatcatcaccaccaataaactcttcaccgatgataaatgcctgcgcgaggccatctgggctaggttgcactttgtactgaagattcaggccccactggctaccgtcacccagcaattgttgaaaacgaggagtatcctgaggtgtactgataatcaaaatatcgcgaatacccgccaacatcagtgtagagagcgggtaatagatcatcggtttatcataaataggtaatagctgtttactgacagccatagtcacaggataaagacgtgtaccagaaccacccgctaaaataatacctttacgcattttcatttcatcattccttttaattcatcttgctccaccatcacgaacaagatgcaaaaactattaaattgctgtagtcgtaaataattcattgagcattcgtttcacgccaacctgccagtcaggcaagacaagcgcaaagttctgctgaaatttttctgtattaaggcgagagttatgtggacgacgagctggtgtaggataggctgttgttggtactgcgttgagcttgttgagtgcaaggggaatgcctgctttgcgcgcctcttcaaaaaccagcgcagcataatcgtaccaggttgtggtaccactggctaccaaatggtacaagcctgcgacatccggtttattcagtgcgacacgaatggcatgtgctgtacaatcagccagcagttcagcacctgttggcgcaccaaactgatcgttaataaccgctaattcttcacgctcttttgccagacgtaacatcgttttggcgaagttatttccttttcctgcatagacccagctggtccggaaaataagatgcttcgcgcaatattcctgtaacgctttttctccggctaacttggtttcaccgtaaacatttagtggtgcggttgcatccgtctccagccatggcatatcgccatttccagggaagacgtaatcagtcgagtaatggataacccaggctccaacttcatttgctgctttcgcaatcgcttcgacacttgttgcgttaattaattgtgcaaactccggttctgattctgctttgtctactgcggtgtgagcggctgcattgacaataatatccggccgaatgcttcttacggtttcagctacaccttcaggattactaaaatcaccgcaataatcagtagagtgaacatcaaaagcaatcaaattacccaaaggtgccagagcacgctgtagttcccaacctacctgccctgttttgccaaaaaggaggatattcattactggcggccctcatagttctgttcaatccacgattgataggcaccacttttcacattatcaacccattttgtattggacaggtaccattccaccgttttacgaatcccgctctcaaacgtttcctgtggtttccatcccaatgcgcgaccaatcttctcagcatcaatagcatagcggcgatcgtgtcccggacgatcagcaacataagtgatttgctcacgataagatttctctttcggtacaatctcatccagcaaatcacaaatagtgagcactacatcgatgtttttcttttcgttgtgcccaccaatgttataagtttcacccgctttaccttcggttacgacggtatataacgcacgcgcatgatcttcaacatacaaccagtcgcggatctgatctcctttgccataaataggtaatgccttaccttccagtgcattaagaataaccagtggaataagcttttccgggaaatgataaggaccatagttgttcgagcaattagtcacaattgtcggtaaaccatatgtacgtttccacgcgcggactaaatgatcgctggatgctttggatgcggaataagggctgcttggcgcgtaagctgtcgtctcagtaaataagggtaattcttctgtattatttacttcatctggatgaggcaaatcaccatagacttcgtcagtagaaatatgatgaaaacggaagctatttttcttgtcgctatcaagagcagaccagtaattgcgagcggcttccaaaaggacataagtaccaacaatattggtttcaataaatgccgcagggcctgtaattgaacggtcaacatggctttcagcagccaggtgcatcactgcatccggctgatgctgagcaaaaatccgtgccattgcaggtgcatcgcaaatatccgcatgttcaaaaacatagcgttcagaatcagaaacatcagcaagtgattcccggtttccggcgtacgttaatttatcgacattaacaacactatcctgcgtattatttataatgtgacgaactacagctgaaccaataaatcctgcgccaccagtaacaagtattttcacttaatttattccatattacttcagagcatgctgtgaaataagcggctctcagtttgattaatagaggtattaatgcacgctaccgcccctggctttacagctaccagagcactgcatgcatgcctatgatgtgacgagcgttacccactcgcgctaaacccgaaaaattcaaacgctaattgtcttaccaatccgctctggaaacaaggaaaatcctggaaaactttgaataaaaccctactgctaactcgttgttattctgatggtttatataaaacaacggcaggaagattcgcaacaaattacttttgctgcgaattttcactgccgttataattttcttatcaaccgttacatccggtcagattttcattattcgcttaacagcttctcaatacctttacggaacttcgccccttctttcaggttgcgtaggccatacttcacaaacgcctgcatatagcccatttttttgccgcagtcgtaactgtcgccggtcatcagcattgcatcaacggattgttttttcgccagctcggcaatagcatcagtcagctgaatacgtccccatgcaccaggctgagtacgttccagttccggccaaatatcggcagaaagcacatagcgacctacggccatgatgtctgagtccagcgtctgcggctgatccggtttttcgataaattcaacaatgcggctgactttaccctcacggtccagcggctctttagtctggatgacggagtattcagagaggtcacccggcatacgttttgccagcacctggctgcggcccgtttcgttgaaacgtgcaatcatggcagcaaggttgtaacgtagcgggtcggcgctggcatcgtcgatcacaacgtctggcagtaccacgacaaatgggttgtcaccaatggcaggtcgcgcacacaaaatggagtggcctaaacctaaaggttcgccctgacgcacgttcataatggtcacgcccggcggacagatggactgtacttccgccagcagttgacgcttcacgcgctgctcaaggagtgattctaactcataagaggtgtcgaagtggttttcgaccgcgttcttggacgcgtgagttaccaggaggatttctttgatccctgcagccacaatctcgtcaacaatgtactgaatcattggcttgtcgacgattggtagcatctctttgggtatcgccttagtggcaggcaacatatgcatcccgagacccgctacaggaataactgcttttaaattcgtcattatttcatccacctgtaaaatggttgctgaattatagcttgttcgatttttttcgccagcatcaattaccctgaattgattactgaattacttgtgatgttacgccgcttcgttgtggattgcagtagcattgttcctaagtatgactccatttttccaggaatggtcgcaaatctactccctcagttccggcaatctaaagttaatcttctccacattaacaatatggtgattaatcctgtcgatatcgacggagctttgtcctttttcattcaccgcatgaacatttgcaagagacagcagtgtttcttttttcgccataaaaacaccacgaacgtctttgcgcatgtcaaagttcatgctcaatgcgggtccaactgaggattcctgcatcacattgatatttcgcataaaaaaatgttgcggtttgttgtgtaactccagcgacgcacgcttcatctcaatgttagttagcgccacaaaggaaacagcattcccggcggagatttgaatgccgcgcaatttataagcaagatgagtattatccagttgaatatcattcacccggaaattttgcggtatcgagagatatttgcctttaattaccccatagccgattaacatcccggcgctattaatcatttcaatattatcaatcacgaaattgtcacaaccgtaaatagcgactgtcgcgttatcaatgcccgctttcttactgaaatccggcgtgatattgcgggctttgatattacgaataacaaaatgtttaccattttcaacatgtatcaactgccgacaatccgatcccgtgatattcgccacgacaaagtttttcactgcctggtcttccgggtagttgttatcataagtgcttcccgcaaggcctatgccgatgccccagttgattttgccgttggtacagttgatgcgctcgatgacatggtcagatatcaaaatatcacggtcgttaattgccacgttccattcaatggcgtcgccttgtaagtcgctgaacttacaattggtgatgttggcaccgataatctggttatgaaatccctggcgtaagatggcgtaattagcgtggctaacggtcaggttatcgatgatcaggttgcgcatgacccgtttgtttttgccgccgatataaatctgcgtcaccgggccaaagccgctcatagtcagccctttgatggtgcagtcagaaccacgcacatccagggtgatgttatgcatactgccgccatcctcccctgtcacctggctgccgtcctgtaagacaaatcgccctctgccgttgccgcgcaagcttccaagaatgtgtaacgttttaccgggagggataaagatgccggtgttgatattgtcacaaaccaatccggcaggcacgacgactgtttgcccttcgctgaaggcttgtttaaatgaggcgatccagtcgtgtgggttgtagtcgttaatgttaacgctttgtcgggcgggaagcgcgcgggcgaaaggggtatggaggaaggcaagcgccgagcttgccgtcaggaacgtgcgtcgggagagttttttaaatggcatgcgttctcctctataaagcctgcagcaagctggcgagttctcgattgatcacctgctggttaaaatcgtgttcaactttttcgcgcgcgcgtttgacgaccggagccaattcgtcggtgtccagttggctaaacgccgccagtcgttgcgccagtgcgcgagcatcgttctcaggcaccagccagccggatttgtcagcctccaccagttccggtattccactatgcagagtagaaaccaccggaataccgaccgccatcgcttccattagcgccaccggaataccttccatatcaccatccgcacctgtaaccgatggcaacaggaagacatccgcgtcgtcgagcatcgctttcacttcatggctcggtttaaagcccggcatctccaccacatcttccagttgatattgttcgatgagggtgcgcaggcgtctttcccacgggccaatgccgaggatgcgatagcgaaatgccacgccctgctctttcaactgacggcaggcttcgatcgccacatgcaggccttttttctcggttaagcgtgcgacggaaataatctccagcggcgttgcgggcgctttcacgggacgcgggctaaagcgcgtcatatctacgcccatgcgcgatacggcgattttttccctcgggcagcccattttttgcagccttccggcccacagatcgcttatcggtaacatcaggtcgccacggcgaaacagttgctgatattcgggagtgtagtggttgagcacttcccgactggagatatcaataccgtggaagatagtggcaattttgccgcgaatgacacccagttcgcggagttttgctgcggttacccccgcgggaccaaaatgagcgatgaacacatcggcgcgaaacggtgttgcgacctggccgcaaatggcagacaaaatcaggttccgcgactcggcaccatagcgtttgaggttgagcgcctgccaggtatttttacgatgaatgccgcgcaaggtctggctggctcggtggcgcagtttcgccactttgcccgtaggttcgtcctgtaaccagcgggttctggcagcaaggttgtatttcgtccatgccgcgtgggtgttttgtgtgtcgcctttttgcagcgcgagaatctctacctcaaatcccatatcaataaacgcggtaatttggttaaggacgaaggtttctgacgacagcgggaatttcagtaaaaagaagccgaccttcatttcacctccccgatgcgctcaagcacagactgcaccatctgcattcctgtctgacgctcacgactgacggcttcactaagtcgcgcattcagcgccggaagctggcctaaggtatccgcaaccatcgcttgcaggctgccgtctaataaatgacggatatcaattgccatctccggtagtcccagctgctgcataatcccggcggatttatgttcgtagttgatggcaattgccggagtggcaaaattcatcgagataatggcagagtgcaggcgcgtaccgacggtgagttcacaggcccccagaattttgcccatttccagatcgttgagttcatccatcactacgtggtaacgggcaggatcgctgatgtgctggcgcaggttgagcgccaccatgcggtcgtctttgttatagctgtcaatgcccgtacaggtggagagcgcaatcacctgatacccttcatcgagaatgcgattgaccaccccggcaaaggctttttcatacgcttgttgagtggtgccgagacgtttgtcaaacggtgccagttcgcgcagggtaatggccaccgttttctgttgtgcggcaacgtccagccagtgttgaacggcatagctggcggtgaagtcttctgtgtggtgatcgaccagccacgcggtatcgacgccatgttccacttttgcggtggtgatattgctgcgtttcatcagatcaaagctgaccgattcgcgcaggatcagcgcgtcgcagtgaccaaaaacgtagttcgccagttggttaaattgctcatcctggaacgggccaacactgtgaccaatcataaacagcggctttttcgccataaacgtgcaaagtgcatgttcaaactgcggcacgccatagagatcgacaaaaaacgatccgccgacctggataatggcgtcgtaacctgacagcaggcgcacgaagtcggtgaatccctgggcgatggcgatattgcgcagcttgccagtgtcggtgacgcgtgagagcaatacctgatgctggtagcggcgacggaggacttttttaacgcgcccgacaacgcccgccgcgctgttgtgttgtttcatttgcaggaacagcggatcgcccattaccgggcggttgagcagccaggaagaactgaccggatagcggctcatcacatccacttcggcgtgtggattgagaatgttgatggcatcaagtaagccgcgcaggatggcgctgtcgccacgattgccgcaagtgtggttgcccagaataagtaatttcattttttcctcataaatttgatgccaggtgaggctgcgtttgttttgttcgttgccgctttttgcctgatgcgacgctgacgcgtcttatcaggcctacaagacccgagcacagaaccgtaggacggataaggcgttcacgccgcatccggcattcagtgcctgatgcgacgctgacgcgtcttatcaggcctacaggtcccgagcacagaaccgtaggacggataaggcgttttacgccgcatccggcaaccgttgtcggaaccgaaaacagcaactcaccccgcccgtaaaagcattttcattttttcgctgcgacaaaactgacgcttcacttccaccaccagcggatggcgcgacagcacaatcatcaccacaaacgccagcacccccgtggctatttgcaccgccagcagcatccccagcgccagttgccctttcagcacaatgcccagcgcataactgaccaccagcgtcggcagcgagagataaaacggcagccataaactcaggatgtactggcgataactggaaccaagaaccggtttaatcatcacgaagtaactcagaatggtgttgataatttgcaccagcaggaagccaagcgtgacgccgatcgcgcccgccatctgcccacctataacaatcgccggaataaacagaaatgttttgaatacgttgaatttaaagctgatatcgacccgcgctttcgccatcagcagcgaaccaatcgggttacctacggagcgcagcagacccaccacacacagcaattgcagcaccggaataatgctgttccacttctcaccaaagaccagcggtacaaagttattcgacaccaccattagcccgagcagcgccggaaagttgataatccccactaccgacagcagcttgtagaagttaacacgcagcttttcggtatcgtcctgaattttggcgaatgccggaaacaacacgcgggtgatgattgggttcagcttcatcggtggcacaacggccacgttgtacgccaggttgtatccccctgccacgcccgcgccgagaatacgcgccagcacgagcgttgaaaggttggtattgagatagttgatgatgctgtccgccgtcagccaggcaccaaagcgtaagttcggtgccaccgacgccagcgagaaatgcagaccggggcgataaattttgcggccaaagtagccaaacagcagcgttctcaccgcactattgaccagataaccgaggatcgcggtcatcgccagcggccagaaatgggcgctaaccaccgtacaagtgaagcccgccagcaccgcgctggtttcgatcatgccgattttgttgaactccagctctttttgcatcaacgcgcggaactgttgcccgtgggggattaccacaaacgccagcgataatgttttaatcaacggtgccaggtccgggttattcagcacgtcgccgatgagatcactcaacaaaaacaccgccacgcacaccacgatccccagcccgacgttcagccagtacaacgtggtgagttcaaggtgactgatttcttttcgctgaataatcgagttagcgataccgaagtcagaaagcgtatctgccagcgcgataatcaccagcgacacggtaagcaggccgaactggtggttgtcgataatccgcgccagcacggtcatctgcaccagcccgaggccgatgatgatcaccgtggcaatcgccgaccacttcgcgccgctgatggttttttcacgtaagctcatatcaatatgccgctttgttaacgaaacctttgaacaccgtcaggaaaacgattttgatatcgaaccagacgctccattcgcggatgtactcaaggtcgaactcgacgcgtttttccattttctccagcgtgtcggtttcgccgcgccagccgttaatctgcgcccagccggtaatgcccggtttcaccttatggcgcagcatgtagccttcaatgagctgtcgatactgttcgttatgcgctactgcgtgcggacgtggaccgacaatcgacatccccccggtcagcacattgataaactgcggcaattcatccagcgaggtacggcgcagaaagttccccactttggtgacgcgcggatcgttctgcgtcgcctgggtcaccactttgtcgttctccatcactttcatggaacggaacttccacactttgatcggcttgccatccatgccgtagcgagtctggcggaaaataaccggccctggtgaactgagtttcaccgccagcgcaatacagcacagcaccggggagatcagcagcagaataagcgtcgccagcacaatgtcttccgcacgtttgagcaggcggttaaccccggaaagcggcgtgtcgtaaagcggcaccaccggtacgccgttcatctcttcgaggcgtgaatggagaatgttgaaggtaaagacgtcggggatcagcagcaccgaacaggtggtgtccgccagttgatggaccagttttttcactcgcgcgccgtcgcacatttgcatcgcgatatagacgttatgaatcttgcccgctttcgcgtcctcgaccagctgttgcaggttacccgcccagtcgttagaaacgccgcccggtttcgggtcgtggtaaacgcccaccacttcaaaccctaaccacggctggttacggaagctctccatcagcatttgcccggcggctaaatcccccgccaccgcgaccatgcgcttgttatagccatgattacgcagccagcccgccccaatgcgaatacacgaacggcaaaccaccagtccgatgctggtcagcgcataccacgccagccagattttcagttgcgtgtcgaaatcattgttgaacgccaccagtccggcgctgaaaatcacgcttaaggtccagttttgtagcaacagggcaaattctgtcgctgcccgaacaccgcgccatgagcgataaaaatcggtgatgccgcccagcatctggaacaccaccagcgtaatcagcgccaccaacaggtgcatgtagaggaatgacagtccgctgacttcgcaaaccagccatagtccggcaaacatgatggtgatatctgaaaagcgttgcaccatagagattaacgatgcattggttttcgctcgctcgcgcttttttagatttgtcatcgttgttcctgttattagccccttacccgcagtggggtaagggaagatccgacattactcgttcagcaacgtcagcagagttcgcgttcgcgcttccatcagcggcacatcaccgcgcgattccacattcaggcgcaccaccggttcggtattggaggtgcgcaggttaaagcgccagtcggcaaaggtcatgctgatgccatcggtgcgatccaccgccagcgcctcacggctaaaatgctgttccacgcggttaatcgcctcaacgggttgcgccagtttgctgttgatctcaccgcttgccggaaacgccgccatccggtcgcgtaccagttcgcccagcgttttatctttcaggcacaccagttcggcgaccagcagccacgggatcatgccgctgtcgcagtaagcgaaatcacggaagtaatggtgggcgctcatttcgccaccatagatggcgtcttccttgcgcatacgttctttaataaaggcgtgtccggttttcgacattaccggcgtgccacctgcggcagtcaccacatcaacggtgttccaggagagacgtggatcgtggatgatcttcgcgccgggatttttttcgaggaatgcttctgccaacaggccgacaatgtagtagccctcaataaactgccctttttcgtcaaacaggaaacagcggtcaaaatcgccatcaaaagcaatgcccatatccgcgccgtgtttgatgaccgcattgcgggtgtcgtcgcggcattccggcagtagtgggttaggaataccgttggggaaattgccgtccggcgtgttgtgcactttgattaattccacgggcgcgccgagggctttaaagcgggcttcaatggcgtccaccaccggacccgctgcgccgttcccggagttgatcaccagcttgagcggcgtgaggtttttgacattgatataaccgaacaggtgatcaacgtaagcgtcacgcaggttgatttgctgatagcgaccgcgtttggtttcatcgacgggaggaaagtcgttggcttcagccagacgctggacgtcgcgcagtccggtatctccgctgatcgggcgagccccctcgcgaaccagcttcatgccgttataatccatcggattatggctggcggtaacttcaatgccgccatccacgccgagatggaacgtggcgaaatagatctcttcggtgccggacataccaatatccagcacgtcaacgcccgcatcctgtaaacctttcgccagcgccagttttaaggtttcgctggtgaggcggacatcaccgcctaacacaatggttttcggtttgagaaattcgccataggcgcgaccaatgcgccaggcgatatcttcattcagttcttcgcctaatttcccgcgaatatcataggctttaaagcaggttaattttttcatatcgttaccctttttcaggcaatagttggccctgaccgaagcggccaattttatttttgtcgttatttacaccgcggtttcgcattcattgcctgatgcgacgtttacacccgtccgtagcgatccgcgaaacgcaccacatcatcctcttcgagataagagccggagcgcacttcaattaaatcgagcggaattttccccgggttttccaggcaatgcgtcgcccccagcggaatataaatggactcgttttcaccaagcagtttgatatcaccatcaatggtgacttttgccgttcccgcgacaaccacccagtgttccgcgcggtgatggtgcatctgtaccgacaagccctcgcccggtttcacggtgatgcgtttcacctggtagcggtcgcccgcgtcgatagagtcatatttgccccacggacgatacacttcgcgatgcacccgatgctcatggcgaccatcggctttgatctgctcgaccacttttttcacatcctgtaccgcgttacggtcggcaatcagcaccgcatctttggtctgcaccactaccagatctttcaccccgacggtggtgaccaggccagattcagcatacacatagctgttttcagttttgtgattaatcacatcgccgtggcaaacgttgccctcggcggtgtgggcgctgatctcccataatgaagaccaggagccaacatcgctccagcccgcatccatcggcaccacaacagcatctgccgtacgttccatgaccgcgtaatccaccgactcttccgggcaggcgagaaacgcttcttcatccacgcgaataaaattgagatccggatcgacggcgctcatcgctttttcacaggcatcgaggatatccgggcgatattttttcagttcttcgagatagcgtccggcgcggaacaggaacataccgctgttccagtaatattcgccgcttgccacataggcctgagcggtttccagattcggtttttcgacaaactgcgccacttcaaaggccaccatatcctgctcacccgcagacacttcaccgcgacgaatatagccataaccggtttctggtagatccggcacaatgccgaaggtcaccagcttgcccgcttcggcatatggcatggcattacgcacggcggcacggaacgcgtcttcatcggcaatcacatgatccgccgccaataccagcattaacgggtcgctctccgggctatgacgttttgccgccagcgccgccagcgcaatggcaggtgccgtgtttcgccctgccggttcgagaataatgttctcggtaagtttgttcagttgacgcagctgttccgcgacaataaagcggtgctgctcattgcaaatcaccaccgggctttcgcactccacgccgttcaggcggcagatggtggtttgcagcatggtgagatcgcctttcaggcataaaaactgcttgggataaagtacgcgggaaagcggccataagcggctaccggagccacctgccatcacaactggatagagtttcgactgcgccataattatccccgaatatcatttataaattgacgtaacacgttctctttatcgagcgtgcgttcggcatattcacgtgccaccgtgttgtgtttgggcagcaggagcgcctgacggatccccgccaccagcgcctcgaccgattccggttcaacgcaaaccgcaatgcccggaaaggtttcgcaaagctgccccagttctgtgtaggcttcagcagtaatcaccgcgttaccgcctactgccagaatattggtcagtttcgacggcaatacggcatctgccgcgccgcgtttttgcaccaccagatggcaatcgcccatcttcagcagtgcgggtaaagcgtcatacgattgcagcgggaaaaattgcatgttgcgcagtccacgctgctgcgccattttttccagccgcgctttgccgccgccctgcccgacaatggcaaaaatcagcggttcatcgcgcagacgatcggcagcttcaataacgttttccagcccctgcttttcaccaatattgccggagtaaagaatgatttttttgttatccggcaggtcaagctggttacgaagggcatcaacatcggcatctgcaacatgctgaaaacgggcaatttccgaccagttggggaagaagatgacgttttccgccgccacgcctttttcgatggctttattcatcatcgaacgcgaaatcgtggagacgttatcgacgttatgcagtccgctacgttcgaacgccgttgccagctgtgccactttgccgcctttgccttttccggcaaggcccagccccagcatggcgtccacttcgtaatcctgaatatgcagcacggtacgcgcaccagagagtttcgccagcaggcgcattcccggcgcgcaaaacagcgttggcaccacgccaataatgcgatccggcttccagcgacgttgcgccatcagcggaaagaaactgctgacggcaaaactgcccagatgcaacaggcgtttcagggtgctcggctgttttggcacatacagcgggcagcgccacaccgtggcggccccctcttctcgtttgtagcgccaggcggaatagttctcgcccacctgccattgcgggtagtaaggcggtgcggtaatgacccgcacctcatgaccttgtgccgccagccattccaccatctcgccggtgtatttgccgatgccggttaactccggcgagtagttaatgccgtagaccagtattttcataatccgggtactccggtacgcttctcagcgagaaaataggcgcggctgttagcatgaacattatcactggcgagcagcgcgtccgacgtcagccagcggtaatcgtcatgctgctcatccggcagtaacagctcttcttccgatactctgaagcgaaaaccgagcaccacatagtgagtggtgaaatccgtgccagagaagttatcgtcataaaagtgctgccagacaccgtaaaactggcctgctgttatcggcaaacgcagccccagttccgccatcgtcagccgctcaaatgcggcttccagcgtttcgtctttctgcacgcgccctcccggcacaaaccagtaaccctgcgccgggcggttggttcttttgccaagcagaaactcgccgcgactgttctcgacaataaagtcgagagagacaagcggagtggagcgcactaccgtggcaaagtcttcctgacgtaaaaacatcattacccccgaaagcggtcttgattctcaaggaaccactggtaagtgctggcaagccccgcttccagtgagatttcgtgataccagccaagctgatgcaggcgcgtcacatccagcagtttgcgcggcgtgccatccggtttgctggcatcaaaaaccacccggcctttgtaacccaccactttggcgatggtttgcgccagctcgcggatagtgcagtcaacgcccgtgccgacgttaatgtgcgacaacatcggctgggtgttctccagccagacttcatgcgccagctccatgacatgaatgctcgccgccgccatatcatcgacgtgcagaaattcgcgcatcggtgtaccgctgccccataccaccacgtccggcgcattctgtgccgtcgcctcgtggaagcgacgcagcaatgctgggatcacatgcgaattactcgggtggaagttgtcgtgtggcccgtacaggttggtcggcatgactgagcggtaatcgcgtccgtactggcggttgtatgattcgcacagtttgatcccggcgattttggcaatagcataaggctcgttagtcggctccagcgtgccctgcaacaactcgctttctgccatcggctgttttgccagtttcgggtagatgcaggacgatccgagaaacagcagtttgttcacgtcgttctgatgcgcggcgtgaatgatgttgctctcaatcatcatgttctggtagatgaaatccgccggataggtgttgttggcaacaatgccgcccactttcgccgccgccagatagacctggtcaatacgttcgctggcaaagaaatcatgcacggcgcggctgtccagcaggttcagctcgtcgcgggtgcgtaataccagttccacatcaccgcgctgttcgagctgccgcctgatggcggaaccgaccatcccgcgatgaccagcaataaaaactcgttgtttactcatgcttatgactccagcgcgatcgccacgtcgtagccgtgagatttcagcagagagtgttttttcgccgcttcgaggtcattagccaccatttcagacaccatctctctgagggtgatttccggtttccagcccagtttttcgtgcgctttggtcgggtcgccgagcagcgtttcaacttcagccggacggaagtaacgcgggtcaacagcgataatcacatcacccggtttaacgcccggcgcgtcatgcccggtgacggaaaccacaatgcccttctcttcaacgcccgtgccttcaaagcgcagtttgatgcccagctgtgctgccgccatttccacgaactgacgcacggagtactgaacgccggtcgcgataacgaaatcttccggctgttcctgctgcagcatcatccactgcatttttacgtagtctttggcgtggccccagtcacgcagggaatccatattgccgaggtacaggcacgactccagcccctgggcgatgttggcgattgcgcgggtgattttgcgggtaacgaaggtttcgccgcggcgcggggattcatggttgaagagaattccgttacaggcgtacatgccgtaggattcacggtagttaacggtgatccagtaggcgtacagtttggcgaccgcatacggagatcgcgggtagaacggcgtggtctctttctgcggaatttcctgcaccagaccatacagttcagaggtggaagcctgatagaaacgagttttcttttccagaccgaggaagcggatcgcctccagcaggcgcagcgtacccatcgcgtcgacgtcagcggtatattctggtgactcaaaagagaccgcaacgtggctcattgcgcccaggttgtacacttcatccggctgtacttcacgcaaaatgcgcgtcaggttagaggtatcactcaggtcgccataatgcagatggaatttcgggttgcaggtgtgcggatcctgataaatgtgatccacgcgctcggtgttgaatgacgatgcgcgacgcttaataccatgcacctcgtaacctttttccagcagaaactctgccaggtaagaaccgtcttgtccggttacaccggtgatgagagcgacttttgacatgtattattcctctgtatttttgaatttattcagtttcaacgcgttcgcgtatcaccactgcgggattcccccggcaaaccacatttgccggaagcgatttaaaaacactgcttcgtgcacccacgacggtgccgtcgccgattgtgacgcctggggcaacaaagacatcggttgccagccagcatttctcgccaatcacaataggcgtggcgttaatggtgaaatgttgacttgcatggtcgtggctaccggtgcataaataacttttttgcgatatcaccgaatgtgcgccaatggttatttcaccgagggtatataaattgacgtcatcgccgacccacgcgtaatcacctaaggttaatttccacggataggtaatttttactgacggacgaataactacgttttttcctatttttgctccgaataaacgtaataaaaaagcccgccagcgatacaatacttgtggcgaccaggcaaatattgttgcctgtactgcccaccataattgcactttaatagcgttgccgccccggaaccctttcggcaccgagaaaccgcttaaatcttgcattggttttccttatattcagactttgttatataaggctttcgtctttgaggtagtacgttggcgtaaatgccaggataattcagcccaaaagccaggcacatgtaatatttgtcgttggacttttttcgcgtcagcacacaattccatattattggtggtagataccccacccatggaaaattcagacaccaggccattgagttttttaaatgcataaccggctttatacattttggctgccagcgcgtagtcggaagaaactttatattccaggtcataacgccattttttcaagccggatacagggaaaaatatcgcctgatgactggcgggcaggctgtgataaatataccagcccggtttggcgctacgtttaattttatgcccgtcgccaaaatccagcagcgcatcgccggtgatcatcacgttatctttttgcatttttaacttacggacaaaatttgcggcattctgatgaaaaatatcgcccgaattgagaaacaacgcgaacttgccttgtgccatcgcaatgcctttgttcatggcgtcgtagataccgttatctggctcgctgacaaagcgtaggttaaagataccattgagattttccagatactcacgggtgccgtcgttggaaccgccatcgacaacaatccattcgaagctgatatcttccacctgcgccagatgcgccagcgaggcatgtgttttgactatcccttcgaggttacgaaacgcgacagtgattatgctaagcaacatgttcttattcttacctcgtaatatttaacgcttttcgcaaaataaacggacagacgattaaaaatgcatattccgggctaaatatcgaaccggtaaaaaacagcgataccggagtaaaaagatataattgcacgcgaaaattgcggttatcaccaaaagcgttgatcatcatttttatcactttccccatgtaccacagtgataaaaacaccgcgaaccaggaaaaataaataatcagcagatacaaaccattgtctatggtttttccgacatccgcaccgttaaatattccgaatgatgcgacatattcataaagtgagccaaatctgactacaccgtcaatatgggtcaaagaataaccgaccatcaccagcggaccgacaatacgataatatgatgacgatccttccgtacctaaatcgcccagacgggtggaaatataaggaaacgcgattaccacaccaaccaggaatacagccagagaaatcaatgctaacggtaactttttcttaatcgcctctttattcagatattgaaatgcccactccagcaaataaaacaggataaaggtcataacccctgaaaacgatccggataatattatccctgcgagaatcatagcatctgttttaggcgttttgataccaaactgtttgatgctgagccaaattgagattaatgccagagcgaaaaatgccggttcgaaataaagtgctgtcgtgcgcttgccgccgaatttaatgaaattcagcacatagctgttgctgtaaatcagatatttcgaaatcgactccataatactgctgccaccggtgaggataatttgtgccatctccaccgccgccagcgccaccaccagcccgaccaccagataaaagaaacgtaatatcttgcgatggttgtgtggcgaaattgttttaaaacgaatactccacaccatgccaataatgatcacaatatagacaaacagcatagttgaagtgacgtatttactggcatccagcgactgaccaaacagatagttaaacgccgtgagtcccgcgccaatccctaaggcaatcatcaattttttaacgctgatgcgttctaaaaacagcagtaacaagacaggtaaaaaagtgacgatggtgatggggaaactttcgccaagctgggcgattttgacgttaaccagcagataaatcagcggcagcaacaggtagctacagattctgatagaagttgacatactcctccagcatctgttgtccactgtaggcggcgcggctgcgttggctgaactcagccagcgtggtaccaaatatcgcctgcgcgatttccggtttgcttaactgcaccagttgcagcacctcttcttcgctgacggttttaccgccggatttttgcaacacttcccgcgccgcatcgctatgggtggcaatcaccggcacgccaatcgatagcgcctcacacaaaatcagcgggtagttatcgacgcgagaactgaataccagcgcatccatctgattgagcgcgctcatcagcttacgtttgtcggtttcaaagccgtgattaaccacgttgccagcggtgaacggcgagaacttaccaaaggtatgcagttcaattttgtcgcccagcgccatcatctcgcgtaccagttgctggttagttttgccgtcgtaacgcagatcatgcgccaccaccgcgattttcggcttgccctgggtttcgcgcaccggaggcaagtccgccagaatcgcttcagttgccatatcaatgccattattgataatccggcaacgccctggaccgtacaggctattgaaagcgtcagccacatgctggctgggggaaataaactgacagcccagcgccagcatctcacggaataactggcgtttgcccgccaccagttggtgtgcgcgatcaatcttcaccggcggatagttatttaaggtcgggcatttctggcagcctgttttccagccttcgcaaccgtcggtaaaggcgcagcgtccggtaacactccagtggtcgtgcagcgtccagaccagagtgacgtccggtttatggtttttcactttttcgcaaaagcgcaccacgctcttaagatttagccagtagctgtgcagcacatgaaaatgcaggaccaccggacccgctgtgcgagtaatggtgcgatataactcattgaaattgccaaacagatcgcgattaaacagacgaaacagagcaatattcgccatcgcggtcatccgcggcgtatgtttgatgacctgcggatagttctgatggctgacgctctctttgccgcctttgccgtaaccgtagacaaaatgtgacgccagcccctgttgcagcgcacgctggtggagatctaacgccacacctgctgccccgccttccgccagtcgcacattaaattgcaaaatattcatttaattaccttcactcgcgctttttctcccaccaccagcgcgttgtccgggacagagtcgagcaccacgctgcccgcgcccacggtgacgttgttaccaagcgtgatatcaccaagaataatgacgttggcaccgagttcgacgccgttgccaatgtgtggacatgccatgttatcggcaccacgattgccgatagtgacgccgtggcgaatggtaaaatcatcccccgctaccacgtttttattgatcacgacggcgtaaccgtgatggatagtaaagcggcggccaatggtcgcggcagcctggatttcataaccgaaaaagcattcggtgataatgcgatacagcaccagcagcggggccgcccacagattgttgaggacgttctttttgcgccacaccgaacaaaaatgagcaacacgataggcaagaaccatgcagcacgggcgtaaactccagctgttggcgcgcagatcttccagcatctttagcgcccccgaataccatcagccagacgtttgccgttacgcaccgacagcagcgtcagcaaagtgcgccaggtcatacgtttattgcggatctggtagagggtaaacagctgatattttttgctggcgcggtcgaatttgtctttgtgcttgcggtaaaagtggaagtacccggagaattttttcggtgacgaggtgatctgcatttcaccgtgattgatatgcaggatctgcgtcgcctcttctactttccacggttcgccgtactccaccaccatccgcaggaagatgtcgtaatcctgtgccgctttcagttcggtatcgaacaaacactctttgaaacgccatgcccaggtaaagacctggttgccaatgatattgcgtttgtagaacaggcggcgtgaatacggcgatttgggatacagcggcaagcttgccggttgggaatagacttcgccctggcaaacgtagtcgttagcgtacaaaaaggcgtgtgtgaccagttgctgtttatgggcgaggaagacgctcagacggttgggtgtccattcgtcatcgtcatcaatcccggtgatatattccccttgcgccagcataatcgcctggttacgtaccgcgcacgccccgctgttaatgtcgttgtgaatgtaagtgatacgcggatcgttgagggcggtgacgtactgttgcagttgttcccaggaggtggagcaatcatccacgatgatcatctcccagttgctgtagtcctggcgcaaaaccgattttattgcccgaatcgccagttgttggcggttccaggtcggcatatagattgagatcagcggattgtttttcataggttgttctcccggcttatgagctggtttgcttgccggatgcggcgtgaacgccttatccggcctacggggcggtgcgaatgcaggcgtcgttatttcgcatccgacttatattcgtattcgtaatagccataatcctgatacgcgctggcgcggcggaagatggagttcagaatcacccctttcaccggaataccgttttgctcaaagcggctcagactggtttccacttctttcaatgtgttgaccgcataacgcgccaccattaacgtggttccgacatgacgaccaacaattgccgcatcggtcactgccagaatcggcggcgtatcaatcaacaccaggtcatagtttttactcgcccagttcaccagttcggcaaagcgttcgctcatcaacagttcagaaggatttggcggcacctgaccgcgcgggatcaggtcaaatttggcaatagaggtcggtttagcagcggtagtaatatcgccctgaccaatcagaatttccgacaggccattaacgttattagtgcccaacagctcgtgggtgtagcctttgcgcatatcgcagtcgatcaacaacacgcgtttattggtctggctgatcaccgccgccaggttggcgcagacaaaggttttaccaattgacgggctaaccccggtcatcatcaacacattgttctgtgcctgcatcatcgcgaagtgcaaactggtacgcagactacggatggcttcaatcgccagatcggttggattccccaccgccagtagctggctctgtttatagcgtttaatccctttgatggttttgacgctatcacgcgctttctgccattccgacagcgggatgctggcatagacgctaataccgtgttcttccagtacttgcgggctttcaatgccgcgattaaacaacgagcgcagcagcacacccacgatagaaagcatcaggccaaggataatcgcgccgaggataatcagccctttcttcggtttcagcacgccaggctgagtgattgccgggtcaacaatgcgcacatcgccgacggtgctggcctcggtgattttcagctcctgctctttattcagcagttgcatatagacctgctgaccagactcgacatcgcgggtcagacggacaatctcctgctgggttttcggcatcgccgttacgcgaccgttaagtttggctttttcgtcttccagcgcctgacgtttctccagcagcgtgcggtacgccgggtgaactttggtgtacagcttggagatttccgcctctttaaaggtcagttcgttcaactgcgcatcgatgttcaccatcgaatcgagcaccgcttttgcttccagcggcagatcaacagaatctttatcctgacggaaggcattcagtttgttttcggcaacatccaagcggctacgtacttccggtaactgttgcgcgaggaaggcgaggcttttcgacgcttccgccgatttgcgctcaatattttgttcctgatagttacgggcgatgctgttaagaatgtcgcggatctgttcacgatcttcaccggtataagtcaggctcaaaacgccagcgtctttgccgttctccgttaccgtcaggctgttttgcagttggttgatcatccccagcgtggagtatttggtgacggtaaactcactgcccgggctggcgtgaatggcttcaaccatcagcgtgacgccttcttttttcagcatctggcccgcttgcccccgggcgctaaagccgccgtcgctgctcagggtgtagtttttgttgtccagcacattaagcgtaaacacctgatccgccatctctttcgggcggttaaaggtggtcactttcaccgtctcgttctgacgtcccatcaggcgatcccagcccgcaccgaaaatcgggaacgtgtttttgctcactgcaatatcgaggtcgagatcgtccaccgttttaccaagcaccagacgcgaacgaatcaactggatctcggcgtccgatgcaggcggtttgttggctaatgccgaaccaatgtcctgcactaacgaattgccgctgttttgctcgatttgtaccagtgcgtcggcactataaatcggcgtggcgaagaaggtgtaaaccacggcacagagggcgaatacggtggtgatgccaatcacccaccagcgcgcttcaatgacggtgccgaccaggcgaccaatatcgatttcatcactgcccgttaccggagcggcatgttgttttactttttctgtcattcttatacctgctctgcgttcaatgcctgcgcccactggcgggcagaccgttcaagtaatgtgtacaccgctgcaaacgtttcccggcttttgcgatacggatcggggatttcacattcgttatcccagtgaccaaacagcatcactttgccgcgcatctccggtgccatctcgcataagcgttcgatatggcgcttttccatggtcaaaatcaggtcgtagttgcgacacagacggcggctgatttgacgggcacagtgaccttccagagacagttgatgttctgcggcgacgctgatagcggtaggatcagcgcccttaccgaccagcgcgccgagtccagcggactccactttcagctccgggtgataacgttgcagtaagcgttccgccgtcggggaacggcaaatattgccgacacagacaactaagatgttgttaaacatgacgattaccagttatgaatgtcgctggctgtatccgtcatgtaacggacaccgctaatagttggcagcaactgattgatcagacggttccagcgggaaaccggggcggtggtgacatacaccacgtcataaggttgcaggcggaattctgtcgccatcaccagcgacgtggcatcggacatatccagctggtagatattggcaatcttgccgttacgcccgccctcgcctttcagcggacgaatgacaaagatgccgctggcgttggaggtggtcatgtcgatgccttcagcattgcccagggcttcagtcagggtcatgccgctaaagtccattttcagggtgctctgtttcttcacttcacccatcacaaatactttcagatcatcattacgtggcacgtagagaatatcgccggggtaaagcaggcgattctggttgaggtcgccgttttgcatcagcgcctgcaaagaaatgcgctcttcacgaccattgtgtgttagcaccacgttgcgccagtcagcggtgtcggtcaggccacctgcggcgttgatggcgtcgagaatagtcagtggcacgttggtgatcgcctgttgaccggatttattcacctgaccggagatataggccttttgtgagcggaaggcggcgatattaacgtccacctgcgggtcagcgatgtacgtcgctaagcgcccggtaatatcactgcggatttcagcgagcgttttcccgactacgtggaccttgccgatatacgggtaaaacatagtgccgtcaggctgtacccagttgccggtgtcgctggagctgcggtactgaccggctggcgtggtgagttccgggtgatcccagacggtgacattaagaacgtcccccggcccgacgcgatactggtaattcgcgatctcactttccagcgtcatattggggcgcgctacattcgggcgtgggcgtaattggtcaatcaggcgcggggtcagcggataaacattcaccattttgtcgagatcgaaatcagcgtcctgctgtttgatgacgtctttgcccatcgtcgacatattgctgcccggaagtactgtgcaaccgcttatcaaggttactgacaccaataatggcatcaatttcattttggatttcatcattgtttatttatcactttggcagagtaattatcctgtgcactattaatagcaatgtcgccatgcacatttaccttgcagttaattgaataaaaatttaactggcatcagtcctaaaaaaattgatttcatccgcaggctattgacagaataattcagactggtctttcaggcatccagacacgctaccgcccctggctttttagctaccaatacactgatttagtttaatttttcacaccctctcagcatgcagtcgttgatgagaaagggttattacggaaattaacttccgaatataaggtgacattatggtaattgaatattggctttccaataatgcaggaggaagtgttacagctaacggaatagcaggcaagataacaattcggtaattggctatttttaagaattatattaagtgtcattcaatatggtttttaggagtttctttaggttgacaatatttaatatagtgtctccacatgcgatatttcttaaataatgttttattattaccacttttaattcagggataatgtgaggttattaccctcaaataatatgagataaatagtgctgcaacattgcatttttgccccgatttatccatgatcgaattgtgacatttgtcatacaacgaataggttttgtacttactatggaatggattgccgatccgtctatctgggccgggttaatcacgctgattgtgatcgaactggtcctcggcattgataacctggtctttattgccatcctcgccgaaaaactaccgccgaagcagcgtgaccgcgcacgggttaccgggctgctgctggcaatgttaatgcgcctgttactgctggcgtcaatctcctggctggtcaccctgactcaaccgctgttcagcttccgctcgtttacctttagcgcccgcgacttaatcatgctgtttggtggtttcttcctgttgttcaaagccacgatggagctgaacgaacggctggaagggaaagacagcaataatcccacacaacgcaaaggtgcgaagttctggggcgtggtgacgcaaattgtggtactggacgccattttctcactcgactcagtgattaccgccgtcgggatggtcgaccatttactggtcatgatggccgccgtggttatcgctatcagcctgatgttgatggccagcaagccgttaacgcaatttgttaacagtcacccgacgatcgttattctctgcttaagcttcctgttgatgattggctttagcctggtggcagaaggtttcggcttcgtcattccgaaaggctacctgtacgctgccattggtttctcggtgatgatcgaggcgctcaatcagttggctatctttaaccggcgacgttttctttccgctaaccagacgctgcgccagcggactaccgaagcggtaatgcgcctgcttagcgggcaaaaagaagatgcggaactggacgccgaaaccgcgtccatgctggtggatcatggtaaccagcagatctttaatccgcaggaacggcggatgattgagcgggtacttaatcttaaccagcgtaccgtcagcagcattatgacgtcgcgccacgatattgagcatatcgatctcaacgcgccggaagaagaaatccgccagttgctggagcgaaatcagcatacgcggctggtggttaccgacggtgatgacgcagaagatttgctcggtgttgttcacgttatcgacctgctacaacagtctctgcgcggcgaaccgctcaacctgcgggtgttgattcgccagccgctggtgttcccggaaaccttgccgttgttacctgccctggagcagttccgtaatgcccgcacgcactttgcttttgtggtggatgagtttggctcggtggaagggattgtgacattaagtgacgtcactgaaaccattgccggtaacttaccgaacgaagtggaagagatcgacgcccgccatgatattcagaagaatgcggacggttcctggacggcgaatggtcatatgccgctggaggatctggtgcaatatgtgccgctgccgctggatgaaaaacgtgaatatcacaccattgccgggctgttgatggagtatttgcagcgtattccaaaacctggcgaagaagttcaggtgggggattatttgcttaaaacgttgcaggtagaaagccatcgcgtgcagaaggtgcagattataccgctgcgtaaggatggcgagatggagtacgaggtgtgatggtatcggtcattttacccaatagccgaaaggaataagatgagggaaccgcgccatcggcgatttaccgccgggagcccgggttgccagggtggtggagattgagccaccctggcacgttcaccggcttgagcgttccatagtagcgaggaacatcaagtgaacggaacagccttcgatcttacatattcagaatataatgatgccgccacgaacgcctgatgcgacgctttacgcgtcttatcaggcctacaggactggtcacctggtaacctacatcttctccagcaacttcttcacatctttgccattacgggaatctttattccgctcggcccagtcattcaggcgacgtttcgcttcgtcctgtagatgtttgcgcagtaactgatccacttgcaggctgtaattgagttgctgccagttgccataaacccgcagcggtactggcgtttctttcaggaaatcaatcagtttgctttccccgttccagccacccacgacccgaatatcaaactgggtgtcgcaggtttgatctgccagattcaacatgccttcccctgtcagcgccagcacaggcgattgaccttgcatgtcgtttaacgtcacgacgccatccttcaacgtcaaatcggtggtaaagcggtcaagccgcgtcacgttatcaaagttttcagcggccttcacatcaccgccattacgctctaccgcttgctgaatcatctgctggaagttcatcccttccatgcgcgtgtcggtcatttcgacatgtgcctgtccttgccagttgtggcggaatgcgtcggcatctatgtcagcaccggagaaatcaccagccagtgacatttttccggtcaacgaaatcggatagttaaacgccttcagaatggtaccaatctcaacgttttccagccgtggctggaagtttatccgcggatttattgatgtcgcgtccagcgtgcccggcagtgaaacctgtccaccgttaagtttgccctgcagttgagtaatttccagcaaacccgacttgttggtcatttgcgtggcaacatctgtaaaattcattccgcgccagcgcacgttactggcctgcaacaaaatatcagccgtaaagccttgcagtccctgataggccggttcatcaatacgcgaagaaatgaccgggcgcggcaacgttgattggctctgcccctgctgcgcggcaccgttttcaccattcgcggtttcattaagcgggatgaggttgtcaagattcagttgcgggaattgcagcctcagctgccattccggtttctctgtcagcgtaacctgtgcttgcccgcttagcgtactatcattggcggtcaaactaatttggttaaatgaaaggcgtttatgtgactcctgccactgggcctggaaactcccctgcccctgaataccttgttttggtaaatcggcaccctgcaactgccagttaatttgttcaatagccgccgttaaatcatgcggataatcagaagcatctaccgtaccgttaagggatatcgtgagatcgcgctgatcgcgattaacccgcccggagaactcaaatgaaccacgatgttggggatcttgttccatttgcaggcgaatattgcggattgtcacctgctcgtcatcttcatgctggaacaccagcacgctgtccgccaccttaagactggatatatcaaacgaccatccgcgatcgtctgacagatccggcaaggtattgtcgcgcggtgcaaccggagcgtcttcactgcgcaccgcttccgtctgcggcgtcagttggatcactgccccttttagcatcacctgcttaacgctcagttgatgactcagtagtggtaaaagcgccacgtccagacgcatgttgtcggcgcgaaccagtggctggcttgcgccctgggcggtgagagacattcgcccggagaggatactaagctgcggccagacgtgccaacgcagtggcccgtcgagctgcaattgataaccgctacgtgcagcaacttgcttgaccatatagtcgcggaaatcattcggattcaccagcaacactaacgcagataacccggccaccagcacgaccaggagtatcatcagcgtcgtcagaaatcgtctcatggtatcctcaatgggcctgaattagtctttatcgattcggctggctaccgcgccctgctggttgcgatatttcgcatcttcacggcggttgtaaggtcgcaccgccgggccggaaagcggctcaaagctcagcgcaccaattaacatgcccggacgcagcgccagcggcagcttaccggagttgtagaactccagcacaatgcaaccagaccagcccggatcgatgcggtgcgcggtgacgtgcaccatcagccccagacgcgccagtgaggaacgcccgtccagccagcccaccagatcggctggcagcgtcaccgactccagcgtcaccgccagcgccagctctcctgggtgaagatagaacgcctcgccctcgtcgagaacgatctcatcgctcatcacgcggtcaagcgcggcgctcacttcatctttgggaccgctcagatcgataaacgctgccgtgtgaccacggaaggtacgaaatttattgcccaggcgtacatccaccgtcgcgccgttaatacgctccactggcggacgtgggttgatcgacaaacggccttcatcaagccaggcttcaatatctcggtcacacagacgcatggcattttctcctttcgcgcatcactcccttaacgccaattacgtcaagggcatactaggttatcactgaacggtacacaatttatcaagcttattcaaagaactgacttattttcgctttcaatatatcgatcgcgatgcggtttttcccgccgcgcggcacgataatgtccgcatattgtttagaaggctcaatgaattgcaggaacatcgggcgcacggttttttgatattgcgccatcactgaatccattgaacgcccacgctcgttaacgtcacgcttgatgcggcgcatcaggcagatatccagcggggtatcaacgaaaatggagaagttaagttcgtcacgcaaacgcgcatccgtcagcaacaaaatgccttcgagaatgatgaccttcttcggctcaaccgtcaccgtttctttcatacgcgtatgttcaacatagctgtaaaccggcaggtcaattgccgagccgcgtttcaacgcttgtaaatgctcaagcagcagactgtgatccatcgcgctgggatggtcgtagttggtcttaacgcgttcttccatcgacagatggctttgatctttgtaatagcagtcttcgggaattacgccgatgtgttcatcaccgacttgctcacgcaattcacgataaagggtactggcaataagactcttgccggaagccgatgcgccagcgataccgataatgacgcactgatgagactgatcagtcatatatttagcgacctgattaacctggatgttaggaagggggcgacgaagcgccaaacgcggcaattatagggatttcatccgtctgataccagtcgaatagcgttgccgcgcgctcagagttaattgttgacaaagaattcccgggggcaaattacgttgatcagttttatgtaaggtaaaaaatgttaaacgcagttgcgcaaattatccgcctttacgtcactttatgagcaattcgcatataaaatgtaaaacttttgtactagcataaacacagaaacgaatactggcgaccaggtcttgcggataaagcggtaatgagcaaacaatcacagcatgtattaattgccctgccccacccgctgcttcacctggtcagtttaggtttagtctcgtttatctttacccttttctcgcttgagctttcgcagtttggcacccaactcgccccactgtggttcccgacgtccatcatgatggtggcgttttatcgccatgccgggcgcatgtggccgggaattgcgctgagctgttcgctgggaaatatcgccgcatccatcctgcttttttccaccagctcgctgaacatgacctggacgaccatcaatattgttgaagccgtggtcggggcagtgctgctacgtaaattgctgccgtggtataaccccttgcaaaatctggctgactggctgcgtctggcactcggcagcgccattgttccgcctctgttggggggtgttctggttgtcctgctgacgcccggagacgatcctctcagggcatttttgatatgggtactgtcagaatccatcggcgctctggcactggtgccgctgggattgttatttaaaccacactatctgctgcgccatcgcaacccacggttgctttttgagtcgctgctcacgttagccatcacactgacgttaagctggctttcgatgctgtatctgccgtggccttttactttcattattgtgctgttgatgtggagcgccgtgcgtctgccacgaatggaagcctttttgatcttccttaccacggtgatgatggtgtcgctgatgatggccgcggatccctccctgcttgctacgccgcgtacgtacctgatgagccatatgccgtggctaccgtttttgctgatcctgctgcccgccaacatcatgaccatggtgatgtatgcctttcgtgcggaacgcaaacacatttccgaaagcgaaacccactttcggaacgcgatggaatattccgctatcggtatggcgttagtgggcaccgagggacaatggctgcaaaccaacaaagcgctctgccagtttctcgggtacagtcaggaagagctgcgcggactcacctttcagcaactgacctggccggaggatctcaataaagatctccaacaggttgaaaagctgataagcggtgaaataaacacctattcaatggaaaaacgctactacaaccgcaatggcgatgttgtctgggcgttgcttgccgtctcactggtgcgccacacggatggcacgccgctctattttatcgctcagattgaagacattaacgagctaaaacgcaccgaacaggtcaatcagcaactgatggagcgcatcactctggctaacgaagcgggcgggattggcatctgggagtgggagttgaagccgaatatttttagctgggataagcggatgttcgagctgtatgaaattcctccacatatcaaaccgaactggcaggtgtggtacgagtgcgtgctgccggaagatcgccagcatgccgaaaaagtgattcgtgattcgttgcaatcacgctcgccctttaaactggaatttcgcattaccgtaaaagacggtattcgccatatccgcgccctcgccaaccgggtactgaataaagaaggcgaagtcgaacgtctcctcggcatcaatatggatatgaccgaagtgaaacagcttaacgaggcattgtttcaggaaaaagagcgcctgcacattacgcttgattccatcggtgaagccgtggtctgtattgatatggcgatgaaaattacctttatgaatccagtggcggagaagatgagcggctggacgcaggaagaagcgttaggtgttccgctcctgacggtgttgcatattacttttggcgacaacggaccattaatggagaacatttacagtgccgacacctcacgttccgcgatcgagcaagatgtggtgttgcactgtcggagcggcggcagttacgacgtgcattacagtattacgccgttaagtactctggacggcagcaatattggttcggttctggtgattcaggacgttaccgaatcacgcaaaatgctgcgccagctgagctacagcgcctcccatgatgcactgacgcatctcgccaaccgcgccagttttgagaaacaactgcgtatcctgctgcaaacggtaaacagtacacatcagcgacatgccctggtgtttatcgatcttgatcgctttaaagcggtgaatgacagcgccgggcatgcggcgggtgacgctttgctgcgcgaactggcgtcgttaatgctgagtatgctgcgttccagcgacgtgctggcgcgactcggtggggatgaatttggtctgctgctaccagactgtaatgttgaaagcgcgcgttttatcgctacacgcattatcagtgccgtgaatgactatcactttatatgggaaggccgtgtgcatcgggtaggtgccagtgccgggattaccttgattgatgacaacaatcatcaggcggcagaagtgatgtcgcaggctgatatcgcctgttatgcctccaaaaatggtggccggggccgggtgacggtttacgaaccgcagcaagctgccgcacatagcgaacgggcggcgatgtcgcttgatgaacagtggcggatgattaaagagaatcagttgatgatgctcgcccacggtgtcgcttcgccacggatcccggaagcgcgtaatttgtggctgatttcacttaagctctggagttgcgaaggcgagattattgatgaacaaacatttcgtcgtagcttcagcgatccggcgcttagccatgctcttgaccgccgggtattccacgaatttttccagcaggccgcaaaagcggttgccagtaaaggcataagcatctccctccccctttccgttgccggtttgagtagcgccacgctggtgaatgatctgcttgagcagctggaaaatagccctctaccaccacggttattacatctgattattccggctgaagcgattttagatcacgcagaaagcgtgcaaaaactgcggctggcgggatgtcggatagtgctcagccaggtgggccgcgatctgcaaatcttcaactcgctgaaagcgaatatggcagattacctgctacttgatggtgagttatgcgccaacgtgcagggtaatttgatggatgagatgctgattacgattattcaggggcacgctcagcgactcgggatgaaaaccatcgccgggccagtcgttttacccttagtgatggatacgctttctggcatcggcgtcgatctgatttatggtgaggtgattgccgatgcccaaccgctggatttgctggtgaatagtagttatttcgcgattaactgaggcgtgcttccccatcgcctgatgcgacgctaacgcgtcttatcatgcctacaaatcgctcattccccaggccggataaggcgctcgcaccgcatccggcgaccaacgtcatgcttcgtctggttgccagccttccgtataccagatatgcaacagcgcataagaacgccagggcttccagcgctcggcataacggcggatttgcgccggtgtcattcccggaaatcgctgtttaatcagataatcatccggcaggaaaacatctttcgcctgccagccacgcaaagcaaaataattcgccgtccagcgcccgatacccggaaaagtttgcagcgttttcatcgcctgctccacatcgcccggtattgtcattggtaaggtgccctccagcgccgcatttgccagatgaatcagcgcctctgcccgtttcaacggcatacctaacgcttttaatgcctgcgggtctgctgctgccagccgctgaggcgtcgggaagcagatatactccggaaaatcatccagccgttcgccataaagctgtgccactctggcggtcaattttgccgccatcgccacgctcaccagttggcctaaaatcgcccgcacgccctgctcaaaagcatcaacacagccgggtaaacgcaatccgggccgcgccgcgcctaacctgcccaacgcaccgttaacaatttgtgggttacattgcagatcaaacaggcggctcattttcgccagacactctgcggcaacaggttctaaacctgcacttaaatttatgtgcagagtatggcgggctatatccggaatagcagtcaccacgccgcgatattcgcccaccgccagactacgggcataataactgtccgcgaccgtttccacactgctcaccgcacgggcggcgagaaatcccaacatccacgaccagtcatacggcggctgccagttcagggtatacatcgcatctccttattcatccgctttcagcataaacgttattcagacgctgcgctttgctttcatattccggttgtcgcgacggcaacatttcgctaaagtcacgccccttcttcaccggcatggggattatttcgtgtttattggttttgattacggtacagcaaactgttcagtggcggtcatgcgtgacggtaaaccgcatttgctaaaaatggaaaacgacagcacgctgctgccttcaatgctttgcgcgccaacgcgtgaagcggtaagcgaatggctgtaccgccatcatgatgttccggcagacgacgatgaaacgcaggcgctgttacgtcgggcgattcgttataaccgcgaagaagatatcgatgttacggcgaaaagcgtgcagttcggtctttcctcactggcacagtacattgatgatccagaagaagtgtggtttgtgaaatcaccaaaatcgttcctcggtgccagcggcttaaaaccgcagcaggtagcgctgtttgaggatctggtctgcgcaatgatgttgcacattcgccagcaggcgcaggcacagctgccagaagcgattactcaggcggtgattggtcgtccgatcaacttccaggggctgggcggtgatgaagcaaacacccaggcgcaagggattctggaacgcgcggcgaagcgtgccggattcagggacgtggtattccagtacgagccggtcgcggctgggctggattacgaagccaccttgcaggaagaaaaacgggtgctggtggtggatatcggcggtggtacgactgactgttcattgctgctgatggggccgcagtggcgttcgcgtctcgatcgtgaagccagcctgctgggtcacagtggttgccgtattggcggtaacgatctggatatcgcgctggcgtttaaaaacctgatgccactgctgggtatgggtggcgaaaccgaaaaaggcatcgccctgccgatcctgccgtggtggaatgcggttgccatcaacgacgtacctgcgcagagtgatttctacagtagtgccaacggtcgtctgcttaacgatctggtacgcgatgcccgcgaaccggaaaaagtggccctgttacagaaagtctggcgtcagcgtttaagctatcgcctggtgcgtagcgcagaagagtgcaaaattgctctttcaagcgtagcggaaacccgcgcctcactgccgtttatcagcaatgaactggctacgctgattagccagcgagggctggaaagcgccctcagccagccactgacgcggattctggaacaggtgcaactggccctggataacgcccaggaaaaaccggacgttatctacctgaccggcggtagcgcccgttctccgctgattaaaaaagcgctggcagaacagttgccgggcattccgattgcaggcggcgatgactttggctccgtcaccgccgggctggcacgctgggcggaagtggtgtttcgttaattgaaaaatggctcagcagcggcttaaatctgcctgcgcctgagccagtttttctgctgcctgacgtaacggttccatcaacggcatggtccgtgctggagcatgaaggcggaatcgctgcaactctgtcgcgccgactgtcaacgccgattccagccgatgtcgtttggcggtcattttcgccattaccgcttgtctgtctgctggcgttatcgcttcattcggcctgaacacaaaacggcgttcacagctcgctttccagtcgataaccgcctgggtcagatggtcgccaaaccctttcacttgcttaacgccacgacgggtaacatctgcggctgtttcaataccaaaagaccgtaacgccgctttacgcgcagggccaacgccgggaatagaggcaacatcaataaaaaatccctccagaaacttctgcttctgccgttcccttgcagtgtcatgaagtgctgccagagcgcgtttctcttcttccggtaacccgagaatttcgtccttcattttttcgagcatcgtccgtttggcgataaaaccttccaggccgcctacctgctggatctggcggactaaatggtcatagtccattttcgcacgattaaatgcctcacggcgttgctgaacttctgctttgtacgctttgcttgtcagactgccaataatccagatagccgccagcacaggaaccaaaataatataacgcggttctgcctgaaggccgcaaagcagcagcgataatgctgacagtgcgatctcaagcagaatgatgtattcgcgccgtaacaggcctaaaggaagcggcctgccagtcggttggaaatgatcgggtaatggcagttgcaatgctggcggtgctactgacgccatcaccatcgcccagactttcgccagcacaaaattcccgccggtggtaatgacctcttcgccgagatcaataaaatagataacaccttgattatccagcgcacaccacgggcagtcagtcaaatgagcggggtaaacatgcattgctgaaacgatacatttctttaactgttggcgtagagagtccagtgccgctacccacgctttagccgtcggacgcccggttgccacgccactttccgtgaatgcctgctgaaacatggcttcaacatcactcggtaacatcgatagcggaatagatcgtggcggcggttttaaaccacgtcgctgattatctgacgcgtaggcataacggaaatgggtaatatccgtctccagcgcattacccgcatcagagataagcggcacaccagaataaggatgccgcccaccaaacaagacgtgaaaaattagcaacgcaaggccaaaattatcgtgattttctgtgcgttcaaaaccgacaaatgatggcaaggtttgtagctctggcggcgtaaaatgcgacacgccgacttcgcataaatgcagtgtgccattggcgttaatttgaaaggagtcgctatcaatcagtaccactttgctgtcgcgacctaccataaaactgttctggtttacgtcacccacgacgtgcccgtgctcgtgaaccgtagcaaaagatgaagcaatattgcgcgcaacatagagtagaaaatcccacgcacaatgagggtaactctggcgacgatgtgccgggctatagatcatatgaatcggttctttaccagaaacttttggcatcataaaaccgataacttttccgcctcgtccaccgtgaagcgttgcctgcggccaggcgacataattcaacaactgcgcgtcagctgtcgcagccataaaggcaagtttgtcctgttttaaggcgggtggcggcgtgtgataaatcttggcgacgctatcgacaaactcctcgatatcataaaccgcgccttcaccacctttgcccagttcacggccaagagtggtcaattcacctgtcgatgtaaatacttttatatttgttttcataatatttcgcgggtagttatattatatttcaatgaataataacaactaaccattaaaattatttctatatggggaaaacccactcaagaataaaaatgataatgcaattttatcaggatacaattcaatttcggcctgataatgattaacttccacaggtttttgctaactttgactacaaagggattctggagaaaaaatgaaaaagatattacttatgttgagtctgctattttttactaccgcgggctttagtgaagtttcggatacgttagtgacgggaggttatgataaacaagcgatgtctgacgcgattaaacatgcgcggaaagaaaccgataaattcatcgaggttatgaataaaaaagatgccgatactttcgcagtcaaagccccgataaccgatcacggaagaaccgagcatttctggcttacggatgtcacttattctaacggcatgtttattggcgtaatcagcaatgaccctggtattgttacaaacgtagaatatggccaggagtggaaaatcaagaaagaagatatttcagactggatgtatacgcgcggggataaaatttacggcggttataccattgatcctttattggtcacctatccaaaagaagaagccgacgagctaagagcaaaattagttcgctaatcagccgttatatttattgtttaaactggcggttgaattgttgtcttcaaccgccatgagaaactcactctgcccacagcgccagtgccaacgttttatcatcatccgtacgctcgtttaccgccgggctggacaaaaactgctttaacaattcaggtaataaatcgagttgttcctgcgttgctgccgccagtccattgaaaaacggggtaaagaaaggcacatgaggagaattatccagcatatttaacgccagtcgctggataccatccgtaaatgctgcaactttgtgcgcacgcccagtgctggtgaaagtttccagtctggaaacggcatcttcgtcggtaatgaagtgcgtcatgttggcatattcacccgccatcggcgtgagaggcaattgcagaccgtgacccaaatctaccaccacgccgccatcgccaatctgcataatcaaggtgccgtcaggcgatgaaatcagtcccagaaatgtgcaggcaaaatcgcgaaccgctaattctttggcttccgcctcggcaaaaagtcgttgacgaatggtcagtaccatatttgtggcgaggacatcattaagccccaattccccgccctgcactttttgcgacatataagccatcgcttcattgacggcgagcatcgcgccttcgccaccctgcgagacactgcctgcgccatcagcgacaaataccgacaataatggctgctggtcatttaaccaggcaatctgcatctggcaggcatcctgacaaggcaagtccgcgctgatgtgcgacgttccaacggttgatgcatagaccagacgccagctcacactgacgtccagccttttggcgcttccagcacaacttccgttcccggcgtggagcgggaaaccgaacgcagcgaactggataaccagctaaacagttcacggaattgtaatccttgcagaggcaaaggctgacgaacgctaatttgtgccagcgtcttcatatccgccccctgaacaccgatggaaaagaaagcaaaccttttatcttcttccccccgaaacactttgttggctgcagcctgccactcatcggttggtgcaccatcggtaatcaggaaaatccacgggcgataatacgaaataccatttgcacgatactcacgtttccgctcctctaccatatccagggctttggtaatggccgcacccattggtgtatcgccctgggcaaacaggatgggcggaaaaaaattagcggcgctggtaaagggttgttccacatgcaccgggccgaacgtcacaatgccgagttccactctttttaaagccagcggatcagcaagcagttcatcacgaaaggtaaccaatccggcgttaagttcattaataggtctaccgttcatagaaccagaaacatccagcagcaaaatgcaggggcaacgtggttccgggttactggcaaaatcgctggtggcaaacgtgatttgttcgctcataagaaatcctttcttagagaattatcgaggtccggtatcataccgactgcaataatgaaataagagcaaacgaagaaactttcagaattaggcccggcggcgcagaaaattttgctattcgcctcgcaagaacggagagccgtcgattgacactaagggcggagtgacataatttcaggagtgagggttagggagaggtttccccctccccctggtgttcttagtaagcctggaagctaatcactaagagtatcaccagtatgatgacgtgcttcatcataaccctttccttattaaaagccctcttctccgggagaggctttcccgtttcagcgtcccgctgaaatcatcggcttacctcctttcgccctgaatgcagtctatcgctaacgcgtgaataaaatagtttcctctgtgattattgcgtaacgactcgcaaagaatatttgctggcaggatcgcagactacaaagcctgcggattgacaatcttatcgtgaaggcatactttcaggagtgagggtagagcggggtttcccccgccctggtagtcttagtaagcggggaagcttatgactaagagcaccacgatgatgagtagcttcatcatgaccctttccttatttatggccccttcctcgggaggggctttcccgtttcagcgtcccgctgaaatcgtcggcttacctcctttcgccatgcaagcagtctatcgctaacgcgtagataaaatagtttcctgtgttattactggatgcgtgctcgcaaatgtgcccgtcattcagacgattccagacagtgtttcataattcctccatttttctcccttattggctggctacactagtatcattccgcgaaacgtttcaggaagagaaactcttaacgatgaaaggtagttataaatcccgttgggtaatcgtaatcgtggtggttatcgccgccatcgccgcattctggttctggcaaggccgcaatgactcccggagtgcagccccaggggcgacgaaacaagcgcagcaatcgccagcgggtggtcgacgtggtatgcgttccggcccattagccccggttcaggcggcgaccgccgtagaacaggcagttccgcgttacctcaccgggcttggcaccattaccgccgctaataccgttacggtgcgcagccgcgtggacggccaactgatagcgttacatttccaggaaggccagcaggtcaaagcaggcgatttactggcagaaattgaccccagccagttcaaagttgcattagcacaagcccagggccaactggcaaaagataaagccacgcttgccaacgcccgccgtgacctggcgcgttatcaacaactggcaaaaaccaatctcgtttcccgccaggagctggatgcccaacaggcgctggtcagtgaaaccgaaggcaccattaaggctgatgaagcaagcgttgccagcgcgcagctgcaactcgactggagccggattaccgcaccagtcgatggtcgcgttggtctcaagcaggttgatgttggtaaccaaatctccagtggtgataccaccgggatcgtggtgatcacccagacgcatcctatcgatttagtctttaccctgccggaaagcgatatcgctaccgtagtgcaggcgcagaaagccggaaaaccgctggtggtagaagcctgggatcgcaccaactcgaagaaattaagtgaaggcacgctgttaagtctagataaccaaatcgatgccactaccggtacgattaaagtgaaagcacgctttaataatcaggatgatgcgctgtttcccaatcagtttgttaacgcgcgcatgttagtcgacaccgaacaaaacgccgtagtgatcccaacagccgccctgcaaatgggcaatgaaggccattttgtctgggtgctgaatagcgaaaacaaggtcagcaaacatctggtgacgccgggcattcaggacagtcagaaagtggtgatccgtgcaggtatttctgcgggcgatcgcgtggtgacagacggcattgatcgcctgaccgaaggggcgaaagtggaagtggtggaagcccagagcgccactactccggaagagaaagccaccagccgcgaatacgcgaaaaaaggagcacgctcctgatgcaggtgttacccccgagcagcacaggcggcccgtcgcgcctgtttattatgcgtcctgtggccaccacgctgctgatggtggcgatcttactcgccgggattatcggttatcgcgccctgcccgtttcggcgctgccggaagtggactatccgaccattcaggtggtcacgctctacccaggtgccagcccggatgtcatgacctctgccgttaccgcgccgctagaacgccagttcgggcagatgtctggcctgaaacagatgtcgtcgcaaagttccggcggtgcgtcagttatcactttgcagttccagctaacattaccgctcgatgtcgccgagcaggaagtgcaggccgcgattaacgctgcgaccaacttgttgccgagcgatctgcctaacccgccggtttacagcaaagtgaacccggcagatccgccgatcatgacgctcgccgtcacctcaaccgccatgccgatgacgcaagtggaagatatggtggaaacccgcgtcgcgcagaaaatctcgcagatttccggcgtcggcctggtgacgctttccggcggtcagcgtccggctgttcgcgtcaaacttaacgctcaggcgattgccgccctcggcctgaccagcgaaaccgtgcgcaccgccattaccggcgctaacgttaactcggcaaaaggtagcctcgacggcccttcccgtgcggtcacgctttccgcgaacgaccagatgcaatccgccgaagagtatcgccagctaatcatcgcctaccagaacggcgcgccaattcgtctgggcgatgtcgcaactgtagagcaaggtgcagaaaacagctggctcggcgcgtgggcgaacaaagaacaggccattgtgatgaatgttcagcgccagcccggtgctaacattatctccaccgccgacagcattcggcagatgctgccacagctcactgagagtctgccgaaatcggtgaaggtgacagtgctttccgatcgcaccaccaatatccgcgcatccgtcgatgatactcagtttgaattgatgatggctatcgcgctggtagtcatgattatctacctgtttttgcgcaatattccggcgaccatcattcccggtgttgctgtaccgctgtcgttaatcggcactttcgcggttatggtgtttctcgatttttcaatcaataacctgacactgatggcgttaactatcgccaccggattcgtggtcgatgacgccatcgtggtgatcgaaaacatttcccgctatatcgaaaaaggcgaaaaaccgttggcggcggcgctcaagggcgcaggtgaaatcggctttaccattatctcgctgaccttctcactgattgcggtgttgatcccactgctgtttatgggcgatatcgtcgggcgactgttccgcgaatttgctattaccctggcggtagcgattttgatctcagcggtggtgtcgctgaccctgacaccgatgatgtgcgcgcggatgctcagccaggagtcgttgcgtaaacagaaccgcttctcccgtgcctcggaaaaaatgttcgacaggataatcgccgcctatggtcgtggactggcgaaagtgctgaatcatccgtggctgaccttaagcgtggcactcagcacgctgctgcttagcgtgctgctgtgggtgttcattccgaaaggtttcttcccggtacaggacaatggcattattcagggcactttgcaggcaccgcaatccagctcctttgccaatatggcccagcgacaacgccaggtcgcggacgtgattttgcaggatccggcagtgcaaagcctgacctcatttgttggcgttgatggcactaacccgtcgctgaacagtgcacgtttacaaatcaacctcaaaccgttggatgaacgtgatgatcgggtgcaaaaagtcatcgcccgtctgcaaacggcggtagataaagtgccgggcgtcgatctcttcctgcaaccaacgcaggatctgactattgatactcaggtcagccgcacccagtaccagtttaccttgcaggccacgtcactggatgcgctcagtacctgggtgccacagttgatggaaaaactccagcaactgccacagctttctgatgtctccagcgactggcaggacaaagggctggtggcgtatgtcaatgttgatcgcgacagcgccagccgtctggggatcagcatggcggatgtcgataacgccctgtacaacgcgtttggtcagcggctgatttccactatttatactcaggccaaccagtatcgcgtggtgctggagcacaacaccgaaaataccccaggcctcgcggcgctggataccattcgcctgaccagcagcgacggcggcgtggtgccgctaagctcaattgccaaaattgagcagcgttttgcgccgctctccatcaaccatctggatcagttcccggtaacgaccatctcctttaacgtgccggataactattcgctgggcgatgcggtgcaggcgattatggacaccgaaaagacgctgaatctgccggtggatatcaccacgcagttccagggcagcaccctcgccttccagtcggcgctgggcagcactgtctggctgattgtcgcggcggtggtggcgatgtatatcgtgctcggcattctgtacgagagctttattcacccgatcaccattctctcgacgctacccaccgcaggggttggcgcactgctggcgttgctgattgctggtagcgaactggatgtgattgcgattatcggcattattttgctgatcggtatcgtgaagaagaacgccatcatgatgatcgacttcgcgctggctgctgagcgcgagcaaggcatgtcgccgcgcgaggcaatctaccaggcttgtctgttgcgttttcgtccgatcctgatgaccactctggcggctctgcttggcgcgctgccgctgatgttgagtaccggggtcggcgcggaactgcgtcgtccgttaggtatcggcatggtcggcggtctgattgtcagccaggtgctgacgctgtttaccacgccggtgatttatttgctgttcgaccgcctggcattgtggaccaaaagccgctttgcccgtcatgaagaggaggcgtaagtgaagttttttgccctcttcatttaccgcccggtggcgacgattttactgtcggttgccattaccctgtgcggcatactgggcttccgtatgctgccggtcgccccgctgccgcaggtcgattttccggtgattatcgtcagcgcctcgctgcccggtgcgtcaccagaaacaatggcgtcttccgttgccacgccgctggagcgctcacttgggcgcattgccggagtcagtgaaatgacctccagcagttcgctcggcagcacgcgtattattttgcagtttgattttgaccgggatatcaacggcgcagcgcgtgatgtgcaggcggcgatcaacgctgcacaaagtttgctgcccagtgggatgcccagccgcccgacctatcgcaaagcgaacccgtcggatgcgccaattatgatcctcacgctgacgtccgatacttattcgcagggtgaactgtacgatttcgcctcgacgcagctggctccgacgatttcgcaaatcgacggtgttggtgatgtcgatgtcggaggcagctcactgcccgccgtacgcgtcgggctgaatccgcaggcgctgtttaatcagggcgtgtcgctggacgacgtacgcaccgccgtcagcaatgccaacgtgcgtaaaccgcagggcgcgctggaagatggcactcaccgctggcagatccagaccaatgatgagctaaaaaccgccgctgaatatcagccgttgattattcactacaacaacggcggcgcggttcgtctgggcgatgtggcgacggtgaccgactcagtgcaggatgtgcgcaacgccgggatgaccaacgccaaaccggctattttactgatgatccgcaaactgccggaagccaatattatccagacggttgacagcatccgggcaaaattaccggagttgcaggaaaccattccggcggcgattgatctgcaaattgcccaggatcgctcccccaccattcgcgcctcgctggaagaagtcgagcaaacgctgattatctcggtggcgctggtgattctggtggtgtttttattcctgcgctcgggtcgcgccactattattcccgccgtttcggtgccggtttcgctgattggtacgtttgcggcgatgtacctgtgcggattcagtctcaataacctttcgttaatggcgctcaccatcgctactggtttcgtggtggatgacgccatcgtggtgctggaaaacattgcacgtcatctggaagcgggaatgaaaccgttgcaagccgcactgcaaggtactcgcgaagtcggttttacggtgctgtcgatgagtctgtcactggtggcggtgttcctgccgctgctgttgatgggcggattgccgggccgactgttacgcgaatttgccgtgacgctttctgtcgccattggtatatcgttgctggtttctctgacattaacgccaatgatgtgtggctggatgctgaaagccagcaagccgcgcgagcaaaagcgactgcgtggttttggtcgcatgttggtagccctgcaacaaggctacggcaagtcactaaaatgggtgctcaatcatacccgtctggtgggcgtggtgctgcttggcaccattgcgctgaatatctggctgtatatctcgatcccgaaaaccttcttcccggagcaggacactggcgtgttgatgggcgggattcaggcggatcagagtatttcgtttcaggcgatgcgcggtaagttgcaggatttcatgaaaattatccgtgacgatccggcagtggataatgtcaccggctttacaggcggttcgcgagtgaacagcgggatgatgtttatcaccctcaagccacgcgacgaacgcagcgaaacggcgcagcaaattatcgaccgtctgcgcgtaaaactggcgaaagaaccgggggcgaatctgttcctgatggcggtacaggatattcgcgttggtgggcgtcagtcgaacgccagctaccagtacacgttgttatccgacgacctggcggcactgcgagaatgggagccgaaaatccgcaaaaaactggcgacgttgccggaactggcggacgtgaactccgatcagcaggataacggcgcggagatgaatctggtttacgaccgcgacaccatggcacggctgggaatcgacgtacaagccgccaacagtctgttaaataacgccttcggtcagcggcaaatctcgaccatttaccagccgatgaaccagtataaagtggtgatggaagtggatccgcgctatacccaggacatcagtgcgctggaaaaaatgttcgttatcaataacgaaggcaaagcgatcccgctgtcgtatttcgctaaatggcaaccggcgaatgccccactatcggtgaatcatcagggattatcggcggcctcgaccatttcgtttaacctgccgaccggaaaatcgctctcggacgccagtgcggcgatcgatcgcgcaatgacccagcttggtgtgccttcgacggtgcgcggcagttttgccggcacggcgcaggtgttccaggagacgatgaactcgcaggtgatcctgattatcgccgccatcgccacggtgtatatcgtgctgggtatcctttacgagagttacgtacatccgctgacgattctctccaccctgccctcggcgggcgttggagcgctgttggcgctggagctgttcaatgccccgttcagcctaatcgccctgatagggatcatgctattaatcggcatcgtgaagaaaaacgccattatgatggtcgattttgcgcttgaagcccaacggcacggtaacctgacgccgcaggaagctattttccaggcctgtctgctgcgttttcgcccgattatgatgactaccctggcggcgctgtttggtgcgctgccgctggtattgtcgggcggcgacggctcggagctgcggcaacccctggggatcaccattgtcggcggactggtaatgagccagctccttacgctgtataccacgccggtggtgtatctctttttcgaccgtctgcggctgcgtttttcgcgtaaacctaaacaaacggtaaccgagtaaatgacagatcttcccgacagcacccgttggcaattgtggattgtggctttcggcttctttatgcagtcgctggacaccaccatcgtaaacaccgcccttccctcaatggcgcaaagcctcggggaaagtccgttgcatatgcacatggtcattgtctcttatgtgctgaccgtggcggtgatgctgcccgccagcggctggctggcggacaaagtcggcgtgcgcaatattttctttaccgccatcgtgctgtttactctcggttcactgttttgcgcgctttccggcacgctgaacgaactgttgctggcacgcgcgttacagggcgttggcggcgcgatgatggtgccggtcggcagattgacggtgatgaaaatcgtaccgcgcgagcaatatatggcggcgatgacctttgtcacgttacccggtcaggtcggtccgctgctcggtccggcgctcggcggtctgctggtggagtacgcatcgtggcactggatctttttgatcaacattccggtggggattatcggtgcgatcgccacattgctgttaatgccgaactacaccatgcagacgcggcgctttgatctctccggatttttattgctggcggttggcatggcggtattaaccctggcgctggacggcagtaaaggtacaggtttatcgccgctgacgattgcaggcctggtcgcagttggcgtggtggcactggtgctttatctgctgcacgccagaaataacaaccgtgccctgttcagtctgaaactgttccgtactcgtaccttttcgctgggcctggcggggagctttgccggacgtattggcagtggcatgttgccctttatgacaccggttttcctgcaaattggcctcggtttctcgccgtttcatgccggactgatgatgatcccgatggtgcttggcagcatgggaatgaagcgaattgtggtacaggtggtgaatcgctttggttatcgtcgggtactggtagcgaccacgctgggtctgtcgctggtcaccctgttgtttatgactaccgccctgctgggctggtactacgttttgccgttcgtcctgtttttacaagggatggtcaactcgacgcgtttctcctccatgaacaccctgacgctgaaagatctcccggacaatctggcgagcagcggcaacagcctgctgtcgatgattatgcaattgtcgatgagtatcggcgtcactatcgccgggctgttgctgggactttttggttcacagcatgtcagcgtcgacagcggcaccacacaaaccgtctttatgtacacctggcttagcatggcgttgatcatcgcccttccggcgttcatctttgccagagtgccgaacgatacgcatcaaaatgtagctatttcgcggcgaaaaaggagcgcgcaatgaagttctggcgacccggtattaccggcaaactgtttctggcgattttcgccacctgcattgtcttgctgatcagtatgcactgggcggtgcgtatcagttttgagcgtggctttattgattacatcaagcatggtaatgaacagcgattacaactgttaagtgatgcgcttggcgagcagtatgcgcagcatggcaactggcgcttcctgcgcaacaatgatcgctttgtctttcagatcctgcgttcatttgaacacgataattcggaagataaacccggcccgggtatgccaccgcacggctggcgtacccagttctgggtggttgatcaaaacaacaaagtgctggttggtccgcgagcgccgattccacctgacggtacacggcgacccattctggtcaacggtgcggaagttggcgcggtgatcgcctcccccgttgagcggttaacgcgcaatactgatatcaatttcgataaacaacagcggcaaaccagctggttgattgtcgccctggcaacgttactcgcggcacttgccacttttctgctggcgcgcggtttactggcaccggtaaaacgacttgtcgatggcacgcacaaactggcggcgggcgatttcactacccgcgtaacgcccaccagtgaagatgaactgggcaaactggcgcaagacttcaaccagcttgccagcacactggagaaaaaccagcaaatgcggcgcgattttatggccgatatttctcacgaactgcgtacgccattagcggtgctgcgcggtgaactggaagccattcaggatggcgtgcgtaaattcacgccggagacggtggcgtctttacaggcggaggtcggtacactgaccaaactggttgacgatctccatcagttgtcgatgtctgatgaaggcgctctcgcctatcaaaaagcaccggtagatttgatcccactgctggaagtggcgggcggcgcatttcgcgaacgattcgccagtcgtggcctgaaactgcaattttccctgccagacagtattaccgtatttggcgatcgcgaccgtttaatgcagttattcaataacttactggaaaacagcctgcgctacactgacagcggcggcagcctgcaaatctctgccgggcagcgcgacaaaacggtgcgcctgacctttgccgacagtgcgccaggtgtcagtgacgatcagctacaaaaattgtttgaacgtttttatcgcaccgaaggttcccgcaaccgtgccagcggcggttccgggctggggctggcgatttgcctgaacattgttgaagcacataatggtcgcattattgctgcccattcgccttttggcggggtaagcattacagtagagttaccgctggaacgggatttacagagagaagtatgaccgagttaccaatcgacgaaaacacaccgcgtattttgatcgtggaagatgaaccgaagctggggcagttgctcattgattatctgcgtgctgcgagctatgcgccgacgcttatcagccacggcgatcaggtactgccgtatgtgcgccagacaccaccggatctgatcctgttagatctgatgctccctggcaccgatggcctgacgctgtgccgggaaattcgtcgtttttctgacattccgatcgtgatggtgacggcaaaaatcgaagagatcgatcgcctgctggggctggagattggcgcagatgattatatctgtaagccgtacagcccacgggaagtggtagcgcgcgtcaaaaccattttgcgccgttgcaaaccgcagcgcgagttgcagcaacaggatgctgaaagcccgttgattatcgacgaaggtcgttttcaggcttcatggcgcggtaaaatgcttgacctgacgcctgcggaatttcgtctgctgaaaacgctctctcacgaaccaggaaaagtgttctcccgcgagcaattgctcaatcatctttatgacgactaccgcgtagtaaccgaccgcaccatcgacagccacattaaaaacctgcgccgcaagctggaatctctcgacgccgaacagtcatttatccgcgccgtttatggcgtcggttaccgctgggaagccgacgcctgccgcatcgtttagttttagcgacattattttgttagccggagatggcgttcagaccagatccggcaacattatcccacgcatggtcagcaaactgacattatctctccgccctggcaggcatcagaaaatcgctcatactttaatcggtaaacagcacctttagatgctgttttcgatacacaatttcaatcaaggagtcattatggctggttggtttgaactcagtaagagcagtgataatcagttccggtttgtgctaaaagcgggcaatggtgagactatcctcaccagcgagctttatacctcaaaaacctctgcggaaaagggcatcgcgtcggtgcgtagcaacagcccgcaagaagaacgctatgagaaaaaaacggcaagtaacggcaaattctatttcaatctgaaagccgctaatcatcaaattatcggctccagccagatgtacgccaccgcgcaatctcgtgaaaccggaattgcctccgttaaagccaatggcacaagccagacggtgaaagacaatacgtaattacgatgccgggcgtgggttgttggcgtccggcgctttaccagagccccccacagcgctacaatgcccgcccttaaagtgggggcactcccctaaccgcttcatcaggtgaagcggatctgacctgtcatcagaacgagagaattatgtttaaaccggaactcctttccccggcgggaacgctgaaaaatatgcgttacgctttcgcttatggcgcagatgctgtttatgcgggccagccgcgttattccctgcgtgtgcgcaacaacgaattcaaccacgaaaatcttcagctcggcatcaatgaagcccacgcgctggggaaaaagttttatgtcgtggtcaacattgcaccgcacaacgccaagctgaaaacctttatccgtgacctgaaaccggtggtggaaatggggccggatgcgctgattatgtccgatccagggctgattatgctggtgcgtgagcacttccctgaaatgccgatccacctttcggtgcaggctaacgccgtgaactgggcgacggtgaaattctggcagcaaatgggcctgacccgcgtgatcctctctcgcgagctgtcgctggaagagattgaagagatccgcaatcaggtgccggatatggagatcgagatcttcgttcacggcgcgctgtgcatggcctactccggtcgctgcctgctctctggctatatcaacaagcgcgacccgaaccagggcacctgcaccaacgcctgccgctgggagtacaacgtccaggaagggaaagaagatgatgttggcaacatcgtacacaagtacgagccgattccggtgcaaaatgttgagccgacgctgggtatcggcgcaccaaccgacaaagtgtttatgatcgaagaggcccagcgtccgggcgagtatatgaccgcgtttgaagatgagcacggcacttacatcatgaactcgaaagatctgcgcgccatcgcccatgtagaacgcctgaccaaaatgggcgtgcattcgctgaaaatcgaaggtcgtaccaaatctttctactattgtgcacgcaccgcacaggtttaccgcaaagctatcgatgacgccgctgcgggaaaaccgttcgataccagcctgctggaaactctggaaggtctggcgcatcgtggctataccgaaggtttcctgcgtcgtcatactcacgacgattatcagaactacgaatacggttattcagtttctgaccgccagcagtttgttggtgagtttaccggtgagcgcaagggggacctcgcggcggtagcggtgaaaaataaattctccgttggcgacagccttgagctgatgacgccgcaaggcaacattaattttacccttgagcacatggaaaacgccaaaggcgaagctatgccgatagcaccaggcgatggttatactgtgtggctcccggtcccgcaggatcttgagctcaattacgcgctgctgatgcgtaatttctccggggaaaccacgcgtaatccccacggtaagtgattaatttcgattatttttcccggatggaaaattcttagaaaccgatcacatacagctgcatttattaaggttatcatccgtttcgctgaaaaacataacccataaaatgctagctgtaccaggaaccacctccttagcctgtgtaatctcccttacacgggcttattttttacgcgtaatacaatgaaataaaaggatttatttctggtcacgtccacacattgaccacatcgacaaaaaagcccctcgactgaggggcttcctgtttctaattacatccacataatttgctgccctgacggcaacgggtgcggccttacgacgtggacttctcccggcttcacaatgtatcgctgtaccgactcataagtgatgaacgtggcgctgcaattcacgttctgacactggtgataacgctcttttgtcgtgtcagtgatatagcggcttgtacgcgcatgtgcggcatgctggcataaaggacaatgaaacatcgcgagcacctcttccggttttgttgatggtgccattttagttaatttacccttacaaaacaaacagataaaataaaaacatcactcattatcttctgtttcgtaccccacatcagaaagcctgacctcaagctctaatgacgtcgtgaagccgctattattcagaaaatgtgtcaccttagtgattgtccagtcctgctcgtctatgacgcgcttaaagccagacactttgaccggtgtttccgtgtaaatatctgcccgaccggtagccaggctgatggagaactctgctacacgggcttatttttttatgcataagccctatctctggtaaccgtcttccattgaccacatcgatagaatcctccttcatagcacgatgcctttcacttatcggcatcgtgctcccacaggttccggctacgcacagccagaacgcgcatatttgacgcttaccaaaaaatattctcactctccacatttgaatgtcagacgagcgacaccatgtaatcctacaccttctgtcttcagctcaactatttgcatttttttgccctgagtaacacagaaatgagttgcatcattttttactatattttctgcaccagatattctacccctggctaaagaagcttcggcttcggtgtagtattggttatcgagtttacgctgaatattacttttatatgcaagaccaaatttaccgatacttgtctcatcattatgcacagcacaaccagacataataaaaatactaattaatgatatagcagctatctttttcatctcaccttcccccattaaataccaacgacactctctagtgtttaaatataataatggcatgattattataattgaataggattataataaatgttctgtacaacatttcctacataagtaggaattacggacattgaggcccttcagggtaactccatgggggctttaatatattatattgaagatgccactgtttagttgaatattaggtatatgctcttttttgaaatttatcggtggcagccgttagtattcgctgtccccattgcaagctcctggtggtaaccactgaatcctccatacttgaactgactttttatcctccgactttcatcctgttctgactccaccttttgttttctgctctacactatctacagaccaatcataaaggcacatacgatcatggcagaatttcccgccagcttactgattcttaatggcaaaagtactgacaatctacccttgcgcgaagcaattatgctgttgcgtgaggaaggaatgacgatccatgtgcgggtcacctgggagaaaggcgatgccgcacgatatgtagaggaggcccggaagtttggcgtcgcaacggtgattgccggtggtggcgatggcaccattaatgaagtttctacggcgttgattcagtgtgagggggatgacatacccgcgctgggaattttgccattaggaaccgccaatgattttgccaccagtgtagggattcctgaggcactggataaggcgctgaaactggcaattgccggtgacgccattgcgatagatatggcgcaggtcaacaaacaaacctgttttattaatatggcgacaggcggatttgggacgcgtattaccacagaaacgccggaaaaattaaaagccgcgctgggtagcgtctcttacatcattcatggcttaatgcgtatggatactctgcaaccggaccgttgtgaaatccgcggtgaaaactttcactggcaaggtgacgccctggtcattggtattggtaacgggcgtcaggccggtggcggtcagcaattgtgtccgaacgcgttaattaacgatggcttgctgcaactgcgcatttttaccggcgatgaaatacttccggctctcgtatcaaccttaaaatctgacgaagataacccgaatattatcgaaggcgcttcgtcgtggtttgatattcaggcaccacacgacatcacctttaatcttgatggcgaaccgttgagtgggcaaaattttcatattgaaatacttccggcagcgttgcgttgtcgattaccaccagattgtccactgttgcgttaatcaaactattctctcttgaaccagggagaatccgtaatgccggatgcggtgtaaacaccttatccggcatacagaacaatactacaccgtaattaattttacccgcgtcttctgcaatgccagtttatccacctctgacacagcatcatcggtaataataatgtcaattttttcgattggtagtacctgattaaaaccgcgacggttaaatttcgatgaatcgagaacggcaatcactttattagcggctgtgaccatcgcaccgctaatagaataaccttcattaaaggtcgtaataccattaaccgcatcaataccatcagcaccgacaaacattaaatcggcattaatatcctgtaatgaacgctcggcaatggaaccatgcatcgagcgcgttttatggcggaccgtgccaccacagacgaccagagtaatgtctttattttcggaaagggcaaacgctgccgggagactgttggtaatcaccgtgatatttttggcggtcattaatccttcggcgataagcattgtcgtacttccgctgtcgagaataacggtctgatcttacccagcaatagtggacacgcggctaagtgagtaaactctcagtcagaggtgactcacatgacaaaaacagtatcaaccagtaaaaaaccccgtaaacagcattcgcctgaatttcgcagtgaagccctgaagcttgctgaacgcatcggtgttactgccgcagcccgtgaactcagcctgtatgaatcacaactctacaactggcgcagtaaacagcaaaatcagcagacgtcttctgaacgtgaactggagatgtctaccgagattgcacgtctcaaacgccagctggcagaacgggatgaagagctggctatcctccaaaaggccgcgacatacttcgcgaagcgcctgaaatgaagtatgtctttattgaaaaacatcaggctgagttcagcatcaaagcaatgtgccgcgtgctccgggtggcccgcagcggctggtatacgtggtgtcagcggcggacaaggataagcacgcgtcagcagttccgccaacactgcgacagcgttgtcctcgcggcttttacccggtcaaaacagcgttacggtgccccacgcctgacggatgaactgcgtgctcagggttacccctttaacgtaaaaaccgtggcggcaagcctgcgccgtcagggactgagggcaaaggcctcccggaagttcagcccggtcagctaccgcgcacacggcctgcctgtgtcagaaaatctgttggagcaggatttttacgccagtggcccgaaccagaagtgggcaggagacatcacgtacttacgtacagatgaaggctggctgtatctggcagtggtcattgacctgtggtcacgtgccgttattggctggtcaatgtcgccacgcatgacggcgcaactggcctgcgatgccctgcagatggcgctgtggcggcgtaagaggccccggaacgttatcgttcacacggaccgtggaggccagtactgttcagcagattatcaggcgcaactgaagcggcataatctgcgtggaagtatgagcgcaaaaggttgctgctacgataatgcctgcgtggaaagcttctttcattcgctgaaagtggaatgtatccatggagaacactttatcagccgggaaataatgcgggcaacggtgtttaattatatcgaatgtgattacaatcggtggcggcggcacagttggtgtggcggcctcagtccggaacaatttgaaaacaagaacctcgcttaggcctgtgtccatattacgtgggtaggatcagtcatcccttcgtggatcattttgactgccgcctgcgctattctgttttttggcgcgctggcgagctgaaatcgctctttaaacccgacttcctgggtctcggtttcactattaccagacattattttcgccgcaccgccatgaaagcgcgtaaccacgcctttttgttcgagaaagcgcaaatcggcacggattgtcgcttccgaggcagcaaatactcccgccagatcctgaacaagcacggttccctgttcattcactaattggatgatcttattccttcgctcgaatgaattcatcgtcatttacccatattcaattgtggctagtgtaaacgaagggggaccattggtgaatgatctgttttgcacaataccgggccagcatcacgctggcccgcggtttcagggaatgagcaacactttgcccggcatagcattacgagcgatgtcacgcaccgcctgggcgaagctttcaaagcttccacggtgagcgattaatggctccaggcttaacttacgttctgtcagcaaccggctcgccgtttcccactcctgccccggccaagggctggagtagttcatccaactgccgataaccgtcagctctttacgcaatattttgccaaacgttgccgatgttaaatgcagatcctgatgcaacgtgcccaccagcgccagttgggcatgaggaccggcaatctctaccgccagttcgacagtttgcggtacgccagccgtctcgaggataagctgattaaagcgcagttcgcgtaaaacgctctgcatttgcggcgcgctcatttcgctactgttaaatgtttgcatcgcaccgaaagattttgccagtgccagtttttctgaactaatgtcgatcgccgtcacactctttgctcccagcgcgacagcgcactgaatggccagcaggccaatggttccggcaccaataataataacgtttttattctcacaaccttgcgctaaatgaaaagcatgcagaccaacggtaatcggctcaataaaagccccatcctcaataggcatatccgtgggtagagcaaagacattttttcgcttaacgacaatatattcagcaaatccaccatcacgccgcgagccaataaaatcatattttgcgcactgggaataaaaccctttcagacactctggacaagtaaaacagggtaataacggcacacaggcaaccgcatcgccagggtgtaaatcatcaacaccggatcccaccgcatcaatatagccgctaaattcatggcctaacgttattggataataatgtgcaccatttttaaatatcctgggtaaatcggaaccacataagcccgagctggcaatttttacccgcacctcatcctgatgtttaatttcaggaatgacgctttctgcaacgcgcacgataccatcagtatcattcaccactgatttcataaaaactcctgattgttaagggggataacctccccctcaggtaaaaattattctgcgagaacgactttctcttgtttaataaagccacgcgctctacgccaggtcatgaaaataccggtcagataaattgcaccgataataatgaaaccgggaatattttgcggggagaaaacctgaatcagtaaccaggtaatgggagaaccgccctgatccattgaagccaccatacccccggcttttaacgccccagcattagccgccagttgggtgtgcaaaccaatagtttgcgtcgcgatccacagggtgatgctcataatgatgacacccgagattaaggtgcggaacagatttccacgatgcacggcgaccgccatcgccacgaagaagccgatggtggcaagatcgccaaacggcagcacctgattacccggcacacaaacagcaattaaaatggtgagtgggataaaaatcaggcttgccgataccaccgccgtatgtcccagcagcaacgccggatcaaggccaatcaggaactcctgaccgccgaacttcgcctgtaaacgactacgagcctgcttagcgatgggcgttaaaccatccatgatgggtttaatcacccgtggcattagcagcatcactgccgccgtttttaccgccagctgcaatacacctttgacatcgtaacccgcgaggatgccgataatcagccccatcacaaaacccacggtgacaggctcgccaaatggaccaaatttgcgctgaatatcgtcggcgctaaatttaattcggttaacgcctgggattttctcgatgatagcatcgaccagcaccgcaatcggccccatatacgccgacgtaccgtgcggaatagcaataccttccagctcaaagaaatttcgggtatcgcgggcaaaccagtcgccgagcttataaacaaacgccgcgtgaattaccacacctgccatccctatcatccatgaaccggttgccagatgcagcaacgcgccggtgaaggtcatatgccagatattccagatatcaacatttaccacccgcgtcatacgggtcagtaacatcgccacgttaaccagaatcgcaatcggaatcgccaccagcgcaatttgcgacgcccaggtcattggtgaagagcccggccagccaacatcgaccacatgcagattcaggtcgaaattttccgccatcgctttcgccgccgggccaatggaatccagcattaagccaatcacaaggccaatgccaacaaagccaatcccgatatgcagacccgctttaaagcaatcgcctgccttcatgcctaatattttagaaaaaataatgatgacaatcggcagcatcaccgtagggccgaggtcgagaatataacgcatgacttctgaaaacataggtcacccctgtaagatagtcagaattttattttgtaatgcttcgataccgataccagaaataaaaggcatgccgtgaactaacggaatatcgccaaaactacgatccactttggcagtggtgcatatcaaatgcacaccatccatataggtttctatttcattaacccgacactggattaattcaacaggaatattatgattctgacacaactctttaatttcttccgccgccatcgtagaggtcgcaaccgcgcctccgcaagcgacaataatcttgcgtttcataaatagtcctttttattgttacagagggatttattcgtctgaatctaaaacatactttgtgaagtattcctttaactgggtttcaggaagagtgattagtgtctcgacgatatcgggctgttgtaacttgccaaataaacagcgtaaaagtttcaattgctgctgcggattttccacaatcaacgcaataaccaacgataccgccacgtcgttatcatcatccgcttgctgaaaatgaactttatttgttggccttaacagataaatggctgacgacttagcatgaatcgcctcacaatgcggtattgcaatagcgtgctgctcaagcattatcccggtagggaattctgcttctctggcaattaatgcctgtggccaggtatcatgaaccacacctttggcgagcatctcattaccgatatgggttaaaacttcgctacgatcgacaaaagaaattccgctacgaacaaacaggttagtcatataccgtccttattccgcacagccgtagcgataggcgcgcaaaacatcataaattttatccataatcagctgatgcggtattgctgataattccccggactgaatgcgttcaaattgtttgggaagatactgactaatcatgcccagtgggatgtccacgccttcaagattcaccatcatcgtttcgacgctatttttaatccgactatgcggccagtaataacgaatacgatccgacaggctgtaacgaatatccagtaatgaatcgttaaaacccgtacgataatattttttccagtattgcggttcgtcgagcatcacttcttcaattaccgccaggcaaccgctgcgattttcaggggcgataagttcctgctcaatttgtgccagtgcaaatatcgcctcgcgtaaagcaaaggttaatgcgggaccgactttcaatattgcaaagtgatcgcggactaattcccaataagccgtccgggtctggtaatcggtagaatgtgcttcataaaccattcgggtgttttctatccattgcgccagcggctgcgcttcctgcggctgataatggataatattgctgtgatcaaattccacacccggctgcaccacgatggcaatcacacgtgttaacgcctctgtcagcccacgggcaataaaggccttttgatgcgtacgtaaagtattggcggcatcttcaacatgggtgatgtgtactgactgaatggcgctggcctcaccgcccggaaccggaacttcggtgccaatgacatagctcagttgctcacgctggcaatctgtcgccacactttccgcagcaaagcaaagcacagcagctcgttccgcaaccgtttctggtgctaacggtatgggatcccccgcgcaggacattgacgcatcaagatgaattttactgaagccggcacgaacatattcctataccagctcgacggatttttccatcgccgcatccgcattttcttgctgccagcagtttggccccagatgatcgccgccgagaataatgcgttcgcgtgcaaacccaactttatcggcaatcgtaaaaacaaattcgcgaaagtctgccggtgtcattccggtataaccgccaaattgattgacctggtttgacgttgcttcaatcagcactttgcgcgtgctgttgcgatcaaatgccagcgccgcttcgataaccaacggatgggcagaacagactgaacatatgccgatatgttcaccagctttatgccgggcaattaacgttttcatgttttttccttgttaaatggcaggtgcgttatgccctgccctcgcagccacaatcggcaatcactttgctcaccacatcgcgcattgcggatttagccgactgcaaataatcccggggatcggtcgcttcagggtgctcggtcaggtaattttttaacgcctgcgagaaggcatttttcagctccgttgcaacgttgattttgcatatccccagtttgatggtttgctgaatatccttagtcgataaccctgacgcgccatgcagcaccagcggtaagttcacccactggcgaatgttctccagtctagaaaaatcaagcgccggtgcgctggcatacatcccatgagccgtgccgatggcgaccgccagggaatcaattccggttgcctcggcaaattcacgcgcctgagcggggttggtgtacaacgcatcggcttcattgacttgcacatcatcttcctggccgccaagttgccccagctccgcctcgacgctgacatcaaagcgatggcaaaaatccaccacctctttgacccgtgaaatattttgcgcaaaaggcaaatgcgaggcgtcaatcatgactgagcgcacgccagaacgaaccttctgagcgatatcgtcaaatttcgtgtgatggtcgagatgaattgccagtggatggtgatattgcttcgccatcgcgctgaccagcgccaacagattttctgtaccagcatgagtaaatgtgccaggcgttccggcgatgatgaccggcgcatgcaggttggcagcggtttctaccaccacttgcatcgtttcgagattgtgaatattgaatgccggaaccgcataaccgccgcgctgtgcgttgttcagcatctgctttgtcgataccacgtacattttcatatcctgtcgtttgttttcgatttcaaaatataatgaaattatttgtttttaaatatcgagataacgatcacaaaaacgacaatatgaaaattattcgaggagtgaaaggcaaaaaaacggcctcccgatagggaagccgtagcaaagtgcgcgtgtttttatgccggatgcggtgtaaacatacgtggcagtgctatgtaggcatgataagacgcttcagcgtcgcatcaggcataggttgccggatgcagcgtaaacgccttatccgtcctacggggtggtgttgttcgtataaggcgtatcaggcgatagtaattttgctatcgagataaacgtcctgcacggcgttaatcagtttcacgccgtcagccatcgatttcttgaacgctttacgtccaagaatcagccccattccgcctgcgcgtttgttgataaccgcagtacgcactgcatcgctgaggtcagtttcaccgcccgcagcaccgccggagtttatcaacccagcccgacccatatagcagttagctaactgataacgcaccagatcaatcgggttttcgctggtcaatttgctgtaaacacgatcgtcggtgtaaccgtaattaattgctttatagccgccgttattttccgccattttttgtttgacgatatctgcaccgatggttgccgccagatggtttgcctgaccggtcaggtcggcggaaacatggtaatcaacgccatctttcttaaaggcggagttacgcaaataggcccacagcactgtcaccatacccagctcgtgcgcacgttcaaaagccgcagaaatttcttcaatctggcgacgtgactcttccgagccaaaatagatagtcgcaccaaccgcaaccgcgcccatgttgaacgcctgctccacgctggcatacagcgtttgatcgtaggtattcgggtaacttagcgtctcgttgtgattaagtttgacgaggaatggaatgcgatgcgcataacgccgcgataccgacgccagcacgccgtaagttgacgccacacagttacagcccgcttcgatcgccagttcaacaatgtttttcgggtcaaagtagagcgggttagcagcaaatgaagctccggcagagtgctcaacgccctggtcaaccggcagaatagaaagatatcctgtgccagccagacgcccggtgttgtacaacgtctgcatattacgtaacaccgctggcgggcgattattgtcaatcattacgcggtctacgtagtcatgtccggggagataaagctggtcagaaggaattgtcatacaacggtgctgtaaaaggttgtcggcgtctttgccaagcaactgcgcaatatctgtcattactatgctcccgtaaattccgattggatatcggctatggattgtcctggcccgccttttgcgggcaatcataatcctggtcgttacgggcgagtttttccatcttttggatgttttttcagcgttttctgttggctcgattcatcagaaaaaatgttagcgcggtcaagttttcaccgcaaaggtatttaaaacgtattattaagtggtattgtcatcgcgtaccttacattacctgtcatgaaggaattaaaagatgaaaacaacagcaaagctgtcgttcatgatgtttgttgaatggtttatctggggcgcgtggtttgtgccattgtggttgtggttaagtaaaagcggttttagtgccggagaaattggctggtcgtatgcctgtaccgccattgcggcgatcctgtcgccaattctggttggctccatcactgaccgctttttctcggcgcaaaaagtgctggcggtattgatgttcgcaggcgcgctgctgatgtatttcgctgcgcaacagaccacttttgccgggttcttcccgttactgctggcctactcgctaacctatatgccgaccattgcgctgactaacagcatcgcttttgccaacgtgccggatgttgagcgtgatttcccgcgcattcgtgtgatgggcactatcggctggattgcctccggtctggcatgtggtttcttgccgcaaatactggggtatgccgatatctcaccgactaacatcccgctgctgattaccgccggaagttctgctctgctcggtgtgtttgcgtttttcctgcccgacacgccaccaaaaagcaccggcaaaatggatattaaagtcatgctcggcctggatgcgctgatcctgctgcgcgataaaaacttcctcgtctttttcttctgttcattcctgtttgcgatgccactagcgttctattacatctttgccaacggttatctgaccgaagttggcatgaaaaacgccaccggctggatgacgctcggccagttctctgaaatcttctttatgctggcattgccgtttttcactaaacgctttggtatcaaaaaggtattattgcttggtctggtcaccgctgcgatccgctatggcttctttatttacggtagtgcggatgaatatttcacctacgcgttactgttcctcggtattttgcttcacggcgtaagttacgatttttactacgttaccgcttacatctatgtcgataaaaaagcccccgtgcatatgcgtaccgctgcgcaggggctgatcacgctctgctgccagggcttcggcagtttgctcggctatcgtcttggcggtgtgatgatggaaaagatgttcgcttatcaggaaccggtaaacggactgactttcaactggtccgggatgtggactttcggcgcggtgatgattgccattatcgccgtgctgttcatgatttttttccgcgaatccgacaacgaaattacggctatcaaggtcgatgatcgcgatattgcgttgacacaaggggaagttaaatgaaaacagaacgtattctcggtgctctttatgggcaggcgttaggggatgcgatggggatgccctccgagctttggccacgcagccgcgttaaagcacactttggctggattgaccgttttcttcctggaccaaaggagaataacgcggcctgttattttaaccgcgccgaattcaccgacgatacctcgatggcgctgtgtctggcggatgcgttactggaacgtgaaggcaagatcgatccggatctgattgggcgtaatattctcgactgggcgctgcgtttcgacgcctttaacaaaaacgtactaggtccgacctcgaagattgcgcttaacgccattcgcgacggtaaacccgttgctgaactggaaaacaacggcgtgaccaacggcgcagcgatgcgcgtctcgccattaggttgtttgcttccggcgcgtgatgttgattcctttattgatgatgtagcgctggcgtccagcccgacccataaatccgatctggcggttgcaggcgcggtagtcatcgcatgggcgatttctcgtgccattgacggagaaagctggtcagcgattgttgattccctgccttcaattgcgcgacatgcacagcaaaaacgcatcactacgttcagcgcctcactggcggcgcggctggagattgcgctgaaaattgtgcgcaatgccgacggcaccgaatccgccagcgaacagctttaccaggtcgttggcgcaggtaccagcactattgagtccgttccgtgcgccattgcgctggttgaactggcacaaaccgacccgaatcgctgcgccgtcctgtgcgctaaccttggcggcgacacagacaccatcggtgctatggcgacggcaatttgcggcgcgttgcatggcgttaacgctatcgatcctgcgttaaaggcggaactggatgcggtaaatcagcttgatttcaaccgctatgccacagcgctggcgaaatatcgtcaacaacgggaggcggtatgagcggcgctcgattacacacgctgctgcctgaattaaccacgcgtcagtcggtgatggtcgtcggcgcggcggtcattgacgtgatcgccgacgcttatgccctcccctggcgtgggtgcgatatcgaactgaaacagcagagcgttaacgttggcggctgcgcactgaatattgccgtggcgttaaagcgcctcggcatcgaagcgggtaatgccttgccgctcggtcagggcgtgtgggcggagatgattcgcaaccggatggcaaaagagggcttaatcagcctgatcgataacgccgaaggtgataacggctggtgtctggcgctggttgagccggatggcgaacgcacttttatgtcattcagcggtgttgaaaatcagtggaatcgccagtggctggcgcgattaaccgttgcgcctggcagcctgctctatttttccggttatcaactggcctcgccctgcggcgaattgttagtggaatggctggaagagctgcaagacgtgacgccgtttatcgattttggcccacgtattggcgatatcccggatgcattactggcgcggatcatggcctgtcgacctttagtgtcgctcaatcgtcaagaggctgagattgccgccgaacgttttgctttatccgcagagataacaacacttggcaagcaatggcaggagaaatttgccgcgccgttgatcgttcgtctcgataaagaaggcgcatggtatttcagcaacgacgcttctggctgcattccggcatttccaacgcaagttgtcgacaccattggggcgggcgacagtcatgccggtggcgtacttgccgggctggcctctggtctgccactggcggatgccgtattactgggcaatgcagtggcgtcgtgggttgtcgggcatcggggcggtgattgtgcgccaacgcgcgaggaactactcctcgcacacaaaaacgtatagatcgctgcgacagtggctaatgctgtactcaataggccgttgctgttggtcaagcgccacttgcttgatcaccagcaccggtattttgctatctaactgaatatgtgactgaaactcggcatccggcatccgggcgctaacgcgggaacgcgtacgttgtgggtaaatgtgctggctgcggaaatagtcataaagtgaaatcccgatggcatcaacatcatgaattaaatgcgccggaacccacgattcctcaatcgataccgcttcttcatcgacatagcgaatacgcttaagcaaaaagacatcacttcctgcttcgaccgccagctgctgcgcgacttcttcgggacatttcacgacacgcttgttaacccatagcgtatcgggctttttcccgcgcaataccacctgctgagaaaaacctcgcgcttctttcaacgagtattcgaagatgttgttgatctgcgtgccgtaaccgcgcgaacgcgtcaccacaccctcttcttccagcgcctgcatcgccttgcgcaccgtaatgcgcgaaacgccggttaactgacttaaatcacgctcaccgggcaaaatattgccatgctccagcaccccgctgcgcacggcattttttaccgtttcggcaaacttaatataaagcggcgtgttatccgccgctaaaatacgctcgttcagttgggcaatcagctgggtatgcgcttgttccatttgtctttttcctgccggggagtctggtgggagtatatcactgcttcttatttaaggcgtttctttaatcccatcaacgaatgcctgcaactcctccaccgtgccattaaatacattaaaatccaccggaccattgatgccatctacctgtccacggtcggaatgctgccagaagcgccaggccattccgtcattgtccggacgacgttgatagtagtgagccacccaccacggatattcattgaaatagcccgccagattggtgtgataaaaaacggctcctgagtaaataatcggctttttccccgtacttttttcgaccatttttagccactgacttacccgcttgcgtaattcttttgccgataattttccccgttcttctacgtccagcacggcagggaaatcgccttgtgagaaatccaccgtttgcagaaataatctcgcctgaactgaagcggataccgacggggagaaataatgatacgccccacgcagcaggccattttcgcggcttagttgccagttacgcgaaaaataggggtccaccagcttttcgccttccgtcgccttaataaaagcaaactgtaagcggataccattgtcgcgcatttttgccacccgctgccagtcgatccgctcctgccagcgcgaaacatctattccgtgaatggtgtaactggcaggaatgcgaatagcgaaagatttaaccgggcgataaccgtagaagtggatgtagtctgtaatctgaactgctgtcgaatagaaaaaattcaccgtctgacgcggataaattgcaacgatggaaattagcccaagagcgcataatagagaggtgagtttttttcgactggtaattcttagctgcattggtttcatccctgaatgtcagtgccaaaggctgacaataaccaaagcagctatagtacggtgctcaccaccaggcgtggaagtggtgaaccggaccaataccgtgaccaacttccagcgtgtcggcctgggctaacgccgatgaaagccagctttttgcctcctgtacggtgtcagcccagtttgtatggcgcgggcgtagtgcagccaacgccgcagagagtgtacaaccagtgccgtgggtgtttttggtcataatgcgcggtgcggtaaaccgttgttcaccctcgcgggtaaacagccagtccgggctttgctcatcatccagatgaccacctttcattagcactgcgccacagcccatcgccaacagcgatcgcccttgttccagcatttcctgttcggtgcgcgcgtgtggcgcgtcgagcaaggcggcagcttcgggcaagtttggcgttattaatgaaacctgtggcaataatcgactgcgcagcgtagcaaccgccgaaggtgaaagcagcgggtcgccgctttttgccagcataacggtgtcgagtaccacgttttggatctgataacgttgcaaccgttctgccaccgcttcaacaatatcggtttccgccagcataccgattttagtggtatcgattcgcacatcgctgaacaccgaatcgagctgggcggcgacaaaatcaggctcaatgcgatacaccgactgtacgccacgggtattttgcgccaccagtgcagtaataactgagcaaccataagcgccaagtgccgagaaggttttaagatcggcctgaatccccgcaccaccactcggatcagtaccggcaatcgtcagagcgttaattcgtttcatgcctgcacctcctgcgtcaattgccagagcgcatcaaggaaatgtggaacaaaactgcctggcccctcgcttctggcgactgcgcgttctccggcttgtttcatccagtgacaggcagatgcgacattttccagcgtatcgcctggtaacgcacagcaggcagcgacaaccgccgataatgcacagccagttcctaccactttggtcattaacggatcaccaccgtgaataccaatgatacgatgtccatcggtaacataatccatctcgccagtgaccacgacgattgcgccagtttcccgtgccagtgtttgtgcagcgggtatcgcgttagctgcggcgtcagtggtatccactccccgtccgccattagcaatgccagctaatgccatgatttccgaagcattaccacgtatcgctgccggtttaaaagataaaagttcatgacaaaaatggcggcgataatcgagcgcacccaccgctactggatcaagcgtccagggtgtttgagagctttttgcttgctcaacggcagcacgcatcgcctgagcgcgtggctgcgtcagtgtgccaacgttaatcaacaaggcactggcgatagccgcaaactgactggcctcttcggtttcgataaccatcgctggcgatgcaccgagcgccagcaaggtattggcggtaaaggtttgcaccacatcattggtcatgcagtgcacaagaggggaatgttggtgaaaaaggtgtaacgcgtgcgcagattgcgctgaacccagcaggtcgacttgcatagtttgctcctgccataacgtgaagaagcaatgacctggtggtccgtgacttccctacgctggcattatccagatcaggtgatacgggtatttctcagccttcacgcagaagggcaccccgagtcgtttggttgcgatgataaatcgcagaggaggatggtaatgtccagcgcacgcgttgtaaacgaggaaaaacggcagttttacaatcgcgttaataaattatttgatatatgaatccagcaccttcagaacgacatccagatcttcttcacgttttagctcatccccctggtgaacgatgtgttccgtcagatgacctttaatcacttcccgcatcagaccgtttaccgcgccacggatagcagcaatctgttgtaaaactgcagcgcattcgtgcggctcgtcgagcattttcttgagcgccacgacctggccctgaatcttactggcacgcgctttcagtttctgtttatcacggattgtatgagacatggcaacacctggttaacaagaatatgaaaaatcatagcactattaatctactggggggtagtatcaggtactgggggggagtagaatcagattgccgaattaatactaagaattattatcatgaccgaatttacaactcttcttcagcaaggaaacgcctggttcttcatccccagcgccatcttacttggtgcgcttcatggcctggaaccagggcactcaaaaacgatgatggcggcgtttatcatcgccatcaaaggcaccattaaacaagcggtgatgctcggactggcagcaactatttcgcataccgcagtggtctggttaattgcctttggcgggatggtgatcagcaagcgctttactgctcaatcagcagaaccgtggctccagctgatttccgcagtgatcattattagcaccgcgttctggatgttctggcgtacctggcgcggcgaacgcaactggctggagaatatgcacgggcatgattatgagcatcatcatcacgatcacgaacatcaccacgaccatggacatcatcaccatcacgaacatggcgagtatcaggatgcccatgcacgagcccatgccaatgacattaaacgacgctttgatggtagagaggtcaccaactggcaaattttgttatttggcttaaccggtggccttatcccctgcccggcagcaattaccgtgctgttgatatgcattcagttgaaagccctgacactgggcgcaacactggtcgtcagtttcagcattggcctggcgttaacgcttgtcaccgtaggcgttggcgcagcaatcagcgttcagcaggtcgcaaaacgctggagcggatttaacactctcgctaaacgcgccccctatttttccagtctgttgattggcttagtcggtgtgtatatgggcgtacatggcttcatgggcataatgcgataactcaatcctttaggcttgcatgttatcttcagcccaggatgattcttaaatcagctatttccgctgactctctgctcgctaaggatgcttttagggcatcctttcatttacactttttacgaaatcatgggatcactaacaaaatatcgcttgtcagttatattgtatggcaggaaagatatgcgactgatattacagatccccaaagtggagagtttatgaccattaaaaataagatgttgctgggtgcgcttttgctggttaccagtgccgcctgggccgcaccagccaccgcgggttcgaccaatacctcgggaatttctaagtatgagttaagtagtttcattgctgactttaagcatttcaaaccaggggacaccgtaccagaaatgtaccgtaccgatgagtacaacattaagcagtggcagttgcgtaacctgcccgcgcctgatgccgggacgcactggacctatatgggtggcgcgtacgtgttgatcagcgacaccgacggtaaaatcattaaagcctacgacggtgagattttttatcatcgctaaaaaaagccccctcatcatgagggggaaatgcagacaccttgttattttttattattagccacttgctcgtcttgcttgttattagtcgtatttcacgttgattaatgcggttgcctccagtgcgccagatttaactttgtttgtatcgtagacgtagtaactggctgttatcggaattgaaaccgttgtatctgtaagttttgacttcgccgcaacttcctttaaatttgtatatcctttactgctgttagtgatatttaaaagtgtgactggcgaaccattactttcaagaataaatcctacgccattatcttccgcacctttcagtattgtgttgctgttggttaacaagtcagaacttgataaatacacctgcattttccgtgatgtttgattttgttgacctaataaatttttacaacgcagaataatatccccttgtttactatttattgttgctttgttacctgtggctggtaattgtgaaacgggaatactgtctaaagtaattaataaatcgtccggtttgcaggttgtggttatcgggttgtatgacaatgtcagattaaaggaatagacacctgcattttgtgccaatgcatttctgtagctatttacacatgcatcccatgacttgccacctaataaacacagtagaaattgtactgcggcactcccgcgtgtcgatgatgaagcactggataatgtcgcaacaccattaatcatcactgaaccgccgccccccgcagaaacattcacttttgcattactggccgcaggtgtcaccgcaactgaataaccactggtgaaactggtctgattatttgacaacgtgatgttgtttttattggtccattcaaaatgtaaatttaattttatggtatcgttataaagtccaacaataatatccgacgggctcataggggtgatagtatttgtacttacgcatgacgaatcattaaaattatgctcatatgtcgccatttgtgtttgagtaagtgcaaaatccccctgaacaaccaagttgtgctgaacagataactcactataacatgccgcatagctcacaggcataaccatcatcattaatataaatagcattatgcgaatttccatagaaccacctgactattactggcaaatataatttctactttcatcaatctctttaccgaaggtgattgtgcatgaaagtccttgttgcttatcaattgccacattaaccgatggcggtacttcattggtgcgaataaataactgacttccctggccgacaacgccaatattatgaccatggatatcattgacttcataaccaaacgttaatgattgcccatctgctcttaacgcttttataaaccatggcttgcgctgatcggtatcaaaattaaccagtacaaccgcgccgcgataaggggcggcaattttccggttgccacgtaattctgcttcgctatcgctttgcgacacatccagcatcaggtgattttcccgataaggtgtcattccgtcgtatatcaccactccattacggtttgttgtgcgatatttttgcccattgacataagcatctttaattcctggcgcattcatcacagcaaacgtttcggaaagacggttcgccagattaacgccacccgaccaggcgacaatgccccctgaaacactggctccagcctgtcgataagtactcgactgactataactgccattcactgtcgcaaccggcgcgttccaggtcaaattcgccccagctgtcgtttcatttccctgatgttgatgactcaggttgacaccataattgaactgatcccgactccctactgttcctgataatcccgtattatttgaggcaaacccctgatcatcaaacgtcgttgagttagacatatatatttgccgacgaggcgtcgaaacgtcatcaccccaatcaaagggaatcgatataaaaatattaaaacgtttctcttcatgatgattctcgtcataagcctggcttgccgcgagggtatagcttatccgtcgcaggttgttggaataactcaactgataatccttactactgccgctacgcccccagtaatctcgccataacgtacttaatgacacagacccccaaccttctggcaatgactggctcatattggcggaaaagctatttttgcggccaaaatcgttctggtaataatcggcaatgtcatagacatcgttttcatcacggcgataattatctttattgtttgcccaaacgtgatcgttaaatgtccggtaatcacgcgacgaataacgccaggccgccagaccaaaacgcgtcgacgtttggctcacaaatttgttgtaggcaatttgataactttgcccgtcaaacacatcgccgttgtcttgtttactatgcgacttagtggcatcgacggaaatggcaccaatgcgtgtattccagccagcccccaaagtaaacgcgtaataattattcgcgaccatcgagccaccatacagcgtcaataaattattaaaaccatactgataacccgcctggacaaaatcactttgtttgctcgccccttcaatatggctacgacccgccgctaaatcatatttcgacacgccgggttgcagcatatttggcaccgctgcataaggcaccagataggtggttaccgagccgtccgcctctttcacgctgacatcaagatctgctccaccaccggccaactgcaaatctgtaatcgcgaacgggccaggaggaacctctttctgataaaccacaaaaccattctgttcaatagttaccagcgcgttactctgagcaatcccctgcacccgtggcgtaaaattttgtttcgagttaggcaacatctgcatatcacgaaacaaccgcacacctctgaagcgaacagaatcaaaaatatcgcttgatgtgtacatatcacccacgcgaagcgtgccgagaagttgggcaaatccacgttccagatacagggtattgcttttccacacccctggattgttatttgttttactgaaactggcatcagaatgcagttgccaccccagtaaatttaacccgctgttaaaacgtacatatgtactcttgttattacccgacgctttatagtcgctgtaatactgactcagataataagaggtataaaacgcattaataccccgctcccagttttccggtggaacatagccactttccagttcttccacccaggcctgcgggacactgaaatcgagacgaaaaaccccgatatcccaggtatagctcccaccctgaacaagttgctcaaatgttaaacattgcttaccgctggcgaagttatcgctattaatgcctaaccgcttgataacttctcttgataaacatgtttcttgcgggttgtctttaacaataatctcatatttcccgcgccattgcttattgacataaatatcgatgtcatactgccccggtaagggttgattatcatcaagacgaatatttgcaacctgctggtctttcattccacctatcataaaatgggtatcaaaggtttcttcagctgcataagcttcaatgccgagcaataacgctacgattgctgatgcaagtggggtcattctcaacataggcagctcctgcaattaaattttgtcactaatatagttgccatggtcatcgataatggtcagatgccagttatttgcattattacttttgacattaacactctgactttctaagggggcaatcataatagtttcataattgactttgacattattagctttgacatccgaaatcgtcacccaattagctgagtcattttttatcaccaaaccattgccactgcgatttaccagcaattttttaaatgtcgctttatttaccggagcaatacccgctggccggtaaaacaacttaattctgttttgcatcgcaaacttcagtgcattcttaccttcttgctctggactatttggtggaatatccagaacattcagataaaaaatgctttctttattagtgggcagtttattcggcataattttgatttttacttgctgcccggaatttgcccctatttttgccactggtggcgttaacatgaaaggaacctgaattttttctggtggtaatgacgtatcgccatcatcaatccacgcctgcagcagcgaagaacggtttccctggttcatcaactgcaccatcacttctttattttctgccgggtaaataatgcgcgtcccgtagataacaattccggcatgtgcaggaaggaccatagaaaaaatgagtaaagataataatcctttcattttaatgcctcttaaattaaaaggccgccatgggatagcggccatgtttattacctggagaaacttacaattttatttattaatcctgcgccacacgcataaccagagaagataacacatcacctgattgcactgagttatctgtcagtttcaggtattttgctttaaacggaatagcatattgaccttccgctgttttataactctcaatgttaaaaggtgcagaaacatccaggacatcgctgttatcacctaaatagagatagtaacccacggtatcgttgctactggctatcgccttatcgttaccggttattttatcgttggtaatcaacgagagttttacaccagcaacttctttcgggcagctaatttttaacatgctgctggttacaccgactgcatcatcataggtagaatatttagctttaccttcaaagacactggttggtacagtcggcatattaatacttactgaatcaccacccgcttcgaatttacacggagattctgcaatattccccttaatagttaatgttccggtatcaacgtctgcagcaaatactccagcgctcataaaaaaagaagaaaagacagcggcagcaataattgaacgtttcataatatgttccttaataaaatttatttttggttgttaagagtctgtatctcttggaaacaaatttctcacatcaaaaaagttgccgcaatgtaaacacattgttttattgatttaaaacaaattaaccattgcaatataaatacaaaaaatatttaagagtattaactatttatcgcatctatcaattaatgtagatttatgtaaatggtattgttgatatcaataaaaaagccgaaatcatttatataaatgatttcggctttctaaatgcaattaaaatcaggttgccaaattaatcgtagcgatttaacacgattcgacgtttgctatcgctacctgcaacaaccacttctgtcgttacacctttgacgggcgaagaaaacagatgacgggtgtcaacattatacgttaactgaccacaatgctgttgaggttgaccattaaccatagccatactgcatgttgggggactgatcctgccattaatcgctaatgtggcagtctctgaagagaatgcgggagaagccaatccataggcaagaaaaataattcctgacagccaatacttattcattgaacgttatccctgtagtaaaggttatgcctggatagaatgagtgcataacaaactatagctgtacatccactacacagccacgaaggatgataatgaagcattgcctgtatgatcaatcgactttgtagagtttcggacgaaggtccgcagaatattcgcagtattaaataagtgttcattaatgcggcaaaaactaatacaccgcatcaatgtaacatctctgcggtgtatgaagaataaccagaatggttaataggcgttagaccgcgcggaaggaaatctcgcctggaatgacttcaccctgccagtagagctgagctgcaacgcggtcagccagctggcggtagatagcggtaaattcgctctccggacggctgataaccgttggcgtacctttatcgagatcctcacgtaaggagatgtgtaacggcatctgccccagcagctgtgtatggtatttttcagccagtttctctgcaccaccggtaccgaaaatcggttcatggtgaccacagttactgcaaatatgcacactcatgttctcgacaataccgagcaccggaacctcgactttctcgaacatcacaatgccttttttcgcatcgatcagcgcgatgtcctgcggggtggtgaccacgactgcaccggttactggaatgttttgcgccagcgtcaattgaatgtcaccggtgcctggcggcatatcaagcaccagatagtcgagatccggccacaaggtttcctgcaacatctgcattaacgccttgctcgccatcggtccacgccacaccatcgcattgtcgtcagtgaccagataaccaattgaattggttgccaggccatgagacataatcggtgccatatgggtaccgtccggcgaagttggacgctgattttctgcgcccaacattgttgggattgatgggccgtagatatcggcgtccagaatgccgactttcgccccttctgccgccagcgccagtgccaggtttaccgccgtggacgatttacccacgccgcctttaccggaactcaccgcgataatgttcttcacaccgttaattcccggctgattcttcacgcgtttcagagtggctatgttatgcgacagtttccagtcgatagctttcgccccggtgatgcgcagcagttcggcgctacattgctcttttaactcttcgaacgcgctatgccagacaaacggcataaccagttccacatgcaacgtgtcgtccatccaggcgacatggtgcaacgctttcagcgtggtgaggttatgcttcagggttgggtgctgaaaattggccagtgtcccggcgaccattgcgcgcaaggcttctggtgatttggcctgggattgttcgttcatcccgactccttttttgtatagataaaccatcagctgatagtttacctgaagaatatagagaagtacttacttaacattttcccatttggtactatctaaccccttttcactattaagaagtaatgcctactatgactcaagtcgcgaagaaaattctggtgacgtgcgcactgccgtacgctaacggctcaatccacctcggccatatgctggagcacatccaggctgatgtctgggtccgttaccagcgaatgcgcggccacgaggtcaacttcatctgcgccgacgatgcccacggtacaccgatcatgctgaaagctcagcagcttggtatcaccccggagcagatgattggcgaaatgagtcaggagcatcagactgatttcgcaggctttaacatcagctatgacaactatcactcgacgcacagcgaagagaaccgccagttgtcagaacttatctactctcgcctgaaagaaaacggttttattaaaaaccgcaccatctctcagctgtacgatccggaaaaaggcatgttcctgccggaccgttttgtgaaaggcacctgcccgaaatgtaaatccccggatcaatacggcgataactgcgaagtctgcggcgcgacctacagcccgactgaactgatcgagccgaaatcggtggtttctggcgctacgccggtaatgcgtgattctgaacacttcttctttgatctgccctctttcagcgaaatgttgcaggcatggacccgcagcggtgcgttgcaggagcaggtggcaaataaaatgcaggagtggtttgaatctggcctgcaacagtgggatatctcccgcgacgccccttacttcggttttgaaattccgaacgcgccgggcaaatatttctacgtctggctggacgcaccgattggctacatgggttctttcaagaatctgtgcgacaagcgcggcgacagcgtaagcttcgatgaatactggaagaaagactccaccgccgagctgtaccacttcatcggtaaagatattgtttacttccacagcctgttctggcctgccatgctggaaggcagcaacttccgcaagccgtccaacctgtttgttcatggctatgtgacggtgaacggcgcaaagatgtccaagtctcgcggcacctttattaaagccagcacctggctgaatcattttgacgcagacagcctgcgttactactacactgcgaaactctcttcgcgcattgatgatatcgatctcaacctggaagatttcgttcagcgtgtgaatgccgatatcgttaacaaagtggttaacctggcctcccgtaatgcgggctttatcaacaagcgttttgacggcgtgctggcaagcgaactggctgacccgcagttgtacaaaaccttcactgatgccgctgaagtgattggtgaagcgtgggaaagccgtgaatttggtaaagccgtgcgcgaaatcatggcgctggctgatctggctaaccgctatgtcgatgaacaggctccgtgggtggtggcgaaacaggaaggccgcgatgccgacctgcaggcaatttgctcaatgggcatcaacctgttccgcgtgctgatgacttacctgaagccggtactgccgaaactgaccgagcgtgcagaagcattcctcaatacggaactgacctgggatggtatccagcaaccgctgctgggccacaaagtgaatccgttcaaggcgctgtataaccgcatcgatatgaggcaggttgaagcactggtggaagcctctaaagaagaagtaaaagccgctgccgcgccggtaactggcccgctggcagatgatccgattcaggaaaccatcacctttgacgacttcgctaaagttgacctgcgcgtggcgctgattgaaaacgcagagtttgttgaaggttctgacaaactgctgcgcctgacgctggatctcggcggtgaaaaacgcaatgtcttctccggtattcgttctgcttacccggatccgcaggcactgattggtcgtcacaccattatggtggctaacctggcaccacgtaaaatgcgcttcggtatctctgaaggcatggtgatggctgccggtcctggcgggaaagatattttcctgctaagcccggatgccggtgctaaaccgggtcatcaggtgaaataatcccccttcaaggcgctgcatcgacagcgccttttctttataaattcctaaagttgttttcttgcgattttgtctctctctaacccgcataaatactggtagcatctgcattcaactggataaaattacagggatgcagaatgagacactttatctatcaggacgaaaaatcacataaattcagggcagttgagcaacagggaaacgagttgcatatcagttggggaaaagttggcaccaaagggcaaagccagataaaaagtttttcagatgctgcggcagcggcaaaagcggagcttaagctgattgcggagaaggtgaagaaggggtatgtggagcaagcgaaggataattctttgcaaccttcccaaacggtaacgggctctctcaaggtagcggacttatccaccattattcaggaacaaccctctttcgtagcagaaacccgtgcgcctgacaaaaatacagatgctgttttaccgtggctggcgaaagatattgctgtcgtttttccgcccgaagttgtacacaccacgttaagtcatcgccgctttcccggagttcctgttcagcaagcagacaaattgccccaattacgtcgcttagcctgtagtgtgtcgcaacgggataataaaacagccacatttgacttcagcgcctgttctttagaatggcaaaacaccgtcgcccaggcgatcagtcagatcgacggcctgaaaacaacacagttaccatcaccagtaatggctgtactcacggcacttgaaatgaaatgcacaagatataaagtgcgtgaggatgttatggatcagatcgtccaggaaggcggtctggaatatgctactgatgtaataatacaccttcaacagattgatattgaatgggattatgcgaataatgtcattattattctgccgtctggcattgcacctagctacttggagcaatattccagatttgaatgacgcctacgtaaacatttatcactgacggaagagtctctctggcaaaaatgtgcacaaaaacttattgccgcaattccacatattccagaatggcggcaaccattaattgctttgttattacccgaaaaaccagaaattgcacatgaaattgcccagcgtctactggggcaaaaaaaattaccctcgcttgagtggttaaaaatagtggcgactgatgagcacattcttgcctcattagaaaaatatcacgaaccatatgccatttttgatgattactattgtggtgcgatatggtcagccaccgtattacaggagcaaggtgttgcagccctgccccgatttgctccctatgccgcaagtgactactgcgccgatgtgttgcgtcatatcaatcatccgttcgcattgacactgcttatacgtgtagccgggcaaactaaacgctgtcacgatcggatgacgaaagccattgctgcgttcccacatgcagcaatggcggcactgacggaacttcttgggcaaaaagaagagaacagttggcgcattatgctaatgacaatgcttatctcacaaccagcactggcagaacaggtcattccctggctctcgacacccgcagttgccgtactgaaatcatgccagcaacaactgacacagccctcaaaccatgccagcgccgatctactgccagccgtagtagtctcccctccctggctttcgaaaaagaaaaaatcgccgattccggtgctggatttagcgccattaggcattgagccaatctgttatctgacagaagaaatcagtaatcaacttttggcgaaatatatctggtattcaaaacacatcacggttagccatgaagaaagtactaccaacctgttggcaaggatgggttttcaacgacggatcgctggtacatatattaaagctcccgaagcggtagttgaggcatggctaaatgaagattattcaaccttactaagtgaatttaaggtgtttcattcacctaccgggcattattggcagttggggattttgacaacattgccgctggagaaagcagtaaaagcatggaatgcccttaccctatctccacataccgataccgaatactccatgttacattttggactcaaagggttacctgggttagtaaactcacttgcacgctatccacaagaagccttgcccatcacgaattacttcgcagcgagtgagctggctcctgccgtcgcccgtgccttcaacaaactgaaaacgctacgcgaaaacgcccgtagctggctgttgaaatacccggaacatgcccttaccggcctgctgcctgcggcgctcggcaaagccggtgaagcacaggataacgcccgcgctgccttgcgtatgcttaccgaaaacggtcatcagccattactgcaagaaatcgcccgacgttataaccagccggaagtaaccgatgcggtgaacgctctgcttgcgctcgatcccttagataatcacccgacaaaaatccccactcttccggccttttatcagccatcgctctggacgcgcccggtattaaaagcaaatgcccaatcactgccagatagcgccctcctccacctcggtgaaatgctccgcttccctcaggaagaggctctgtatccgggattattgcaggtgaaagacgtctgttccgccgactcactggcgggatttgcctgggatctgtttaccgcctggcagaccgctggcgcgccgtcgaaagagagttgggcgttcactgcgttaggcgttctcggtaacgatgacaccgcccgcaaactgacgccattaatacgcgcctggcctggtgaatcccagcataaacgcgccaccgttgggttggatattctcgctgctatcggtagtgatatcgcccttatgcagcttaacggcatcgcccagaaactgaaattcaaagcattacaggagcgggcaaaagaaaaaattgccgacattgccgagagccgcgaactcacggtggcggagcttgaagatcgggttagcaccggatctcggtctggatgataacggttcgctgctgctggattttggcccacggcagttcaccgtcagctttgatgaaaccttaaaaccgtttgtgcgtgatgtttccggcagccgcctgaaagacctgcccaaaccgaacaaaagcgatgatgaaacgcgggcgaacgatgcggttaaccgctacaaattgctgaaaaaagatgcgcgtaccatcgccgcccagcaggtagcaaggctggaatccgccatgtgcctgcgccgccgctggtcgctggaaaacttccagctcttcctggttgagcatccgctggttcgtcacttaacccgccgtctgatttggggcgtttatagcgccgaaaaccagctactggcttgctttcgcgtagcagaagataacagctccagcaccgctgacgatgatcttttcaccctgccggaaggcgatatctctatcggcactcctcacgttctggaaatatcaccaacggatgctgccgcctttggtcagctttttgccgactacgaactgctaccaccgttccgccagctcgaccgtaacagctacgccctgacagaagccgagcgcaatgccagtgaactgacccgctgggcaggcagaaaatgcccgagtggtcgggtcatggggctggcgaataaaggctggataaagggcgaaccacaggatggaggctggatcggatggatgatcaaacctttgggtcgctggtcgttaatcatggaaatcgatgaaggctttgcggtaggcatgtcgccagccgaactcagcgctgagcagctcttaagcaagctgtggctatgggaaggcaaagcagaaagatatggctgggggagtaattcaacacaggaagcgcagttctccgtaatcgatgccatcaccgccagcgagctaattaacgatattgaagccctgtttgaataaggaaagagcatggacaaggaattaccgtggctggcggataacgcccaactggaactgaaatataaaaaaggcaaaacgccgctcagtcatcgtcgctggccgggcgaaccagtgtccgttatcactggaagtctcatccagacattgggtgatgaattgctacaaaaagctgagaagaaaaaaaacattgtctggcgttatgagaatttttcactggagtggcagtccgccatcacgcaggccatcaacttgatcggcgaacacaaaccctcaatcccggcccggacaatggcggcgctagcctgtatcgcgcaaaatgacagccaacagttgctcgacgaaatcgtccaacaagaggggctggaatatgcgactgaggtggtgattgcacgccagtttattgcgcggtgttatgagagtgatcctctggtagtgacattgcagtatcaggacgaggattatggctatggttatcgctcagaaacctataacgaattcgatctccgactgcgtaagcatctctctctggcagaggaaagctgctggcagcgttgcgccgacaaactcattgccgcactaccaggaataaacaaagttcgccgcccttttattgcgctgatcctcccggaaaaaccagaaatagccaatgagttggtaggccttgaatgcccgcgaactcattttcattctaaggagtggttaaaagttgttgctaatgaccccacagcggtgagaaaactcgaacactactggagccaggatatatttagcgatcgagaagccagctacatgtcgcatgaaaaccacttcggctacgcggcctgcgccgcccttttgcgcgaacaaggactggcagccattccgcgcctcgcgatgtatgcccataaagaagattgcggcagtctgctggtacaaattaaccatccgcaagtcatccgcaccttgctactggtggctgataaaaacaaacccagcctgcaacgtgtagctaaataccataaaaacttcccccatgcgacgctcgccgcactggcagaactgctggcgttaacagaaccaccagcccgccctggttatccaatcatcgaagacaaaaagctgcctgcacagcaaaaagcacgcgatgaatactggcgtacgctgttacaaacgctgatggcatcgcagccacaactggcagcagaagtgatgccgtggttaagtactcaaccccagtcagtgctgaagagttatttatcggcaccgcccaaaccggttattgatggcaccgataacagcaatctgccagaaatcctcgtttcaccaccgtggcgtagtaagaaaaaaatgacagctccacgtcttgatttggcaccgctcgaattaactccgcaagtttactggcaaccaggcgaacaagagaggcttgccgccactgagcctgcccgttatttcagcacggaatctcttgcgcaacgcatggaacaaaaaagtggacgagttgtattacaggaactgggttttggggatgatgtatggctgtttctgaattatatactccccggaaaactggatgctgcacgcaattcactctttgttcagtggcattactaccaggggcgggttgaagagatcctgaatggctggaactccccggaagcacaattagcagaacaggcgctccgcagcggtcacatagaagcgttaattaacatatgggaaaatgacaactactcacattatcgtccggaaaagagtgtctggaacctgtatttattggcacagttgccgcgtgagatggctttgaccttctggctgcgtatcaatgagaaaaagcatctgttcgcgggtgaggactattttctcagtatcctcggattggatgcgctaccaggtctgctgttggctttttcacatcgtccaaaagaaacatttccgttaattttaaattttggcgcaacagaactggcgctgcctgttgcccacgtctggcgacgtttcgcggcgcagcgtgatctggctcgccagtggattttacaatggccggaacatacggctagtgcacttatccctcttgtctttaccaaacccagcgataatagcgaagccgcattacttgccctgcgtttactgtacgaacagggacatggcgaattgctacaaaccgtggcaaaccgctggcagcgtacagatgtatggtctgccctggagcagttgcttaaacagggtccaatggacatttacccggcacgcattccaaaagcccctgatttctggcatccgcaaatgtggtccaggccgcgccttatcactaataatcaaactgttaccaatgacgctctggaaattatcggcgaaatgctgcgctttacccaggggggacgtttttatagcgggctggaacaactgaaaacgttctgccagccacaaacgctggcagcttttgcctgggatctcttcactgcgtggcaacaagctggtgcccccgcaaaagacaactgggcatttctggcgttaagtctctttggtgacgaaagcacggcacgggatctgacgacacagatcctcgcctggccacaagaaggcaaatctgcccgtgctgtcagcggcctgaacatccttaccctgatgaataatgatatggcgctgatacagctgcatcatatatcgcaacgggctaaatcccgccccttacgtgataacgcggcggaatttcttcaggtggtcgcagaaaatcgcgggctaagccaggaagagctagcggacagattagtcccaaccctgggccttgatgatccgcaggcgttgagttttgattttggtccccggcagtttaccgttcgcttcgatgaaaatctcaacccggttatctttgatcagcaaaacgttcgccagaaaagcgttccccgtttgcgcgccgatgacgatcaactgaaagcgcccgaggcactggcccgactaaaagggctaaaaaaagatgctactcaggtgagcaaaaacctgctcccgcgtcttgaaacggccctacgtaccacccgacgctggtcgctggcagattttcattctctgtttgttaatcatccctttacccgtctggttacccagcgattaatatggggggtttatccggcaaatgaaccgcgttgtttactcaaagcctttcgtgtggccgcagagggggagttctgcaatgcgcaagatgagccaattgacctgcctgcggacgctctgattggcattgcccacccgttagaaatgacagcagaaatgcgcagtgaatttgcacagctttttgccgattacgaaattatgccgccttttcgccagttgtcgcgccgcacggtgctgctcacacctgacgagtcaaccagtaacagcctgactcgctgggaaggtaaatccgctaccgttgggcaacttatgggaatgcgatacaaaggctgggagtcaggctatgaggacgcatttgtctataacctgggtgagtaccggctggtccttaagttttcacccggttttaaccactacaatgttgatagcaaagcgctaatgagcttccgttctcttcgagtgtaccgtgacaataaatccgtcacttttgccgaacttgatgtgtttgatttgagtgaggcgttaagcgcacctgacgtcattttccattaaaacacagcgggcagtgatgcaactgcccgttatcaacacgacttaccagcggggaaagcgatgatcgtgcaaaaagagctggttgctatttacgattatgaggtccctgtacctgaagatccgttttccttcagacttgagatccataaatgctctgaattatttacaggttccgtctatcgactggagcgattccggctacgtccaacatttcatcaacgtgatcgagaagatgctgacccgctaataaatgatgcgttgatttatataagagatgagtgtattgatgagcggaaattacgaggtgaatcacctgaaactgtaatagcaatttttaatcgtgaactacagaatatattcaaccaagaaatagaataatatactctaaataattcaaattggtccgatccggcgcaacgtcccaatggcctggattataaatctcattatcttaattgcaacggggtccagccgtggttataattcgttcgttggaacacgatgttgcacaggctgtggtgttaggcctgaaaatagtaaataaaagaacctgcctcaccagcaggtttttttatttactgtgatctgctttccagatatttttcgctcaaacaactaatgcgccaaacatttattgcgcgtaaaatatcgtttatttcattaatacatttcagggatgaatatatgtcaccgcagaataatcatctgcagcgtccgcctgctgctgtgttatacgccgatgaactggcaaaattaaaacaaaatgataacgcaccttgcccgcccggttggcagttaagtttgcctgcggcccgtgcttttatccttggcgacgaagcgcaaaatatcagccgtaaagtggtgattagcccctccgctgtcgaacgtatgttagtcactcttgctaccggccgcggtttgatgttggtgggggaaccgggtaccgcaaaatctcttctttctgaattactggcaaccgctattagcggcgatgccgggttaaccatccagggcggggcatctaccaccgaagatcaaatcaagtatggctggaactacgccctgcttatcaatcatggtccgtcaacggaagcgctggtccctgccccgctttatcagggaatgcgcgacggcaaaatcgtccgtttcgaagagataacgcgtacaccgctggaagtgcaggactgtctgttaggtatgctttctgacagggtgatgacggggccggaactcactggtgaagccagtcagctctatgcgcgagaaggctttaatattattgccactgccaatacccgcgatcgcggcgtcaatgaaatgagtgctgcgctaaagcgtcgcttcgattttgaaacggtttttccgattatggatttcgcccaggagttggaactggtcgccagtgcttcggcgcgtttgctggcccatagcggtattccgcataaagtgcctgacgcggtactggaattactggtccgcaccttccgcgatctgcgtgccaacggcgaaaagaaaacgtcaatggatacactgacagcgattatgtccaccgctgaagccgtgaacgtggcccatgctgtgggcgtccgcgcctggtttttagcgaatcgcgcgggggagcctgccgacctggtggaatgtattgccggaaccatcgtcaaagataacgaagaagatcgcgcgcgtctgcgccgttacttcgaacagcgtgtcgccacacataaagaagctcactggcaggcttattatcaagcccgccaccgcctgccgtgaggaaagatgcatgagcgagccgttaattgtcggcatccggcatcatagtccggcctgcgcccggctggtgaaatcgttaatcgaaagccagcggccacgatacgtgttgattgaaggcccggctgattttaatgaccgggtagacgaactgtttttagcccaccagcttccggtagctatttacagttattgccagtatcaggacggtgcagcccccgggcgtggtgcctggacgccatttgctgaattttcgccggagtggcaggcgctacaagccgcacgtcgcattcaggcacaaacttacttcatcgatttgccttgctgggcgcagagtgaagaagaggacgattcgcctgatacgcaagatgaaagccaggccttactgctgcgtgccacccgcatggataacagcgataccctgtgggatcacttgttcgaagatgaaagccagcaaactgcattaccctctgcgctggcgcactattttgcccaactgcggggcgacgcctccggcgatgcgctcaatcgtcagcgcgaagcctttatggcccgctggattggatgggcgatgcagcaaaataatggcgacgtgttagttgtctgcggtggctggcacgctccggcactggcaaagatgtggcgcgaatgccctcagaaaattaacaagccagaattgccctcgctggcagatgccgttacaggttgttatctcacaccctacagtgaaaagcgccttgatgtgctggcaggatacctttcaggaatgcctgccccggtatggcaaaactggtgctggcagtggggcttgcagaaggccggtgaacaactgctaaaaactatccttacccgtttgcgccagcacaaattgcccgcttctaccgcggatatggctgccgctcatctgcatgcgatggcgctggcacagttgcgcggtcatacactaccgttacgcactgactggctggatgccatagcaggctcgctgattaaagaagccctgaacgcgccgttgccgtggagctatcgcggcgttattcatcccgataccgatccgattctgctaacgttgatagacacattagcgggtgacggattcggtaaacttgccccttctacgccacaaccgcctctgccaaaagatgtcacctgcgaactggaacgtaccgcaatctcccttccggcggagcttaccttaaatcgctttacccccgatgggctggcgcaaagtcaggtgttacatcggctggcaatactggagatccctgggattgtacgccagcagggaagtacactgacacttgcaggcaacggtgaagaacgctggaaattaacccgcccgcttagccagcatgcggcattgattgaggccgcctgttttggtgccacactccaggaagccgcacgcaataaattagaagccgatatgctggacgcgggcggaatcggcagtatcaccacatgtcttagccaggcggcgttagcgggtctggcgtccttcagtcaacaattactggagcaactcacactattaatcgcccaggaaaatcaatttgccgaaatgggccaggcgctggaagtgctttatgccttatggcggctggatgaaattagcggtatgcaaggcgcgcagatattacaaacgacgttatgcgcgactatcgatcgcacgctgtggctgtgtgaatctaacggcagaccggatgaaaaggagtttcacgctcacctgcatagctggcaagcgctttgccatattctgcgcgatctacatagcggcgttaatttacccggcgtttctctttctgcggcggtagccttactggagcgacgcagtcaggcaattcatgccccggcgctggatcgcggcgcggctcttggcgcactaatgcgtctggaacatcccaacgccagtgccgaagcggcgctgacgatgctggcgcagttatccccggcacaatctggtgaggcgctgcacggtttgctggcgctggcccgccatcaactggcctgtcagccggcatttatcgccggtttcagcagtcatttaaatcaactgagtgaagccgattttattaacgccctgcccgatttacgcgcggcgatggcctggctaccaccacgagaacgcgggacgctggcgcatcaggtgcttgagcattatcaactggcgcaacttcccgtttcggcgctgcaaatgccgttgcattgtccaccacaggccattgcacatcatcaacaactcgaacagcaggcactggcatcgctgcaaaactggggagttttccatgtctgaactgaacgatcttctgaccacccgtgagctacaacgctggcgattaattcttggcgaagcggcagaaacgacgctttgtgggctggatgacaacgcccggcagatagaccacgcgctggagtggctgtatgggcgcgatcctgaacggctccagcgtggtgaacgttccggtggattaggtggctcaaatctcaccacccctgagtggatcaacagtattcacacgctgtttccgcagcaggtgattgagcggctggaaagcgatgccgtgctgcgctacggcattgaagatgtggtgacgaatctcgacgtgctggaacgtatgcagccttctgaaagcctgctacgcgctgttttgcacaccaaacatctgatgaaccccgaagtactggctgccgcccgccggatagtgtgccaggttgttgaagaaattatggctcgactggcaaaggaagttcgtcaggctttttctggtgtccgcgatcgccgtcgccgttcatttattccactggcgcgaaactttgatttcaaaagtactctgcgcgccaacctgcaacactggcacccgcaacacggcaagttgtatatcgaatccccccgctttaacagccgcattaaacgccaaagcgaacaatggcaactggtcttactggttgatcaaagcggatcgatggtcgattcggtgatccactctgcggtgatggcggcctgtttgtggcagttacccggcattcgtacccatctggtggcgtttgacacaagcgtcgttgatctcacggcagacgttgccgatccggtagagttattaatgaaagtacagttgggcggcgggaccaatatcgccagtgccgtggagtatggtcggcaacttattgaacaaccagcgaaaagcgtcattatcctcgtgagcgatttttacgaagggggttcatcatcattactgacgcatcaggtgaaaaagtgtgtccagagcggcatcaaagtgctgggactggcagcgctcgatagcaccgcaacaccttgctatgaccgcgatacggcccaggcgctggttaatgtcggcgcacaaatagccgccatgacgccgggcgagctggcatcatggcttgcggagaatcttcagtcatgaattcactacgtccggaattattagaactgacaccgcaggccctgacggcgttaagcaatgccggttttgttaagcgcagtcttaaggaactggaaaatggcaacgtcccggagatcagccatgagaacgacgctttaatcgccaccttcagtgacggtgtccgtacccagctggcgaacggccaggcactgaaagaggctcagtgcagttgcggggccaacggtatgtgccgtcatcgcgtgatgctggtgttaagttatcaacgactttgtgccaccactcagtctacggaaaaagaagaagagtgggatccggcaatctggctggaagaactggctacccttcccgatgctacccgcaaacgcgcacaggcgctggtcgctaaaggcatcaccattgagttgttctgtgcgccgggtgaaattccctctgcccgcttaccgatgagcgatgtgcgtttttattcccgcagcagtattcgtttcgcccgttgtgattgtattgaaggcacactttgcgaacatgtcgtactggcggtacaggccttcgtcgaggccaaagcgcagcaagcagaatttaaccatttaatctggcagatgcgcagcgaacacgtcacatcatctgacgatccgtttgccagcgaagaaggcaacgcgtgtcgtcaatatgttcagcaattaagccagacattatggcttggcggcatcagccagccgctcatccattacgaggcagcattcaaccgcgcattgcaggcggcagagacctgcaactggcgctgggtgagtgaatcgctacggcaactgcgcgccagcgttgatgccttccacgcccgcgccagccactataatgccggagaatgcttacatcagcttgcggcattaaacagtcgattaaattgcgcacaagagatggcccggcgcgacagtattggtgaagttcctcctgtgccgtggcgcacggtcgttggctctggcattgccggagaagcaaagcttgatcatctgcggctggtgtctttaggtatgcgttgctggcaggatattgagcattatggtttacgcatctggtttaccgatcccgacaccggcagtattttgcacctttcgcgcagttggccgcgaagtgaacaggaaaactcaccggcagctacgcgtcggctgtttagttttcaggctggcgcactggcgggcgggcaaattgtttcacaagcagcaaaacgcagtgccgatggcgagctgctgttagctacccgcaaccgcttaagcagcgttgtgccgctgtcgcctgatgcctggcaaatgttgagcgcgccgttacgccagccgggcattgtggctttgcgggaatatttacgccagcgtccccccgcctgcatacggcctcttaatcaggtcgataacttatttattctgccggtcgctgagtgtatttcgctcggttgggacagcagccgccagacgctggatgcgcaggtcattagcggcgaaggggaagataatgtgctgacgttatcattaccagcctcagccagcgcaccttatgccgttgaacgcatggcggcgcttttgcaacaaacagacgaccccgtgtgtctggtttctggctttgtcagttttgttgaagggcaattgacactggaaccacgggtgatgatgacaaaaacccgtgcctgggcgctggacgcagaaactacgcctgtggcaccgctaccttctgccagcgttttgcctgtgccgtctactgctcatcagttgctgatacgctgccaggcgttacttattcaactgctccataacggctggcgctatcaggaacagagtgctattggtcaggcatagttgctggcgaatgacctcaccgcggtgggtttttatcggctggcacatgtgttgggacaatttcgtaatacagaaagcgaggcacgggtagaagcaatgaataacggtgttttgctttgcgaacaattattccccatgcttcagcaacaaggatgaaatagtgctttttactaagagttctactccagttccggactgctcacgccacggtattaggcatatcctatatagcccctggtgagagtcaccagttccttgattaaataaaatggagttttacatgaaggctttcaataagctgttttccctcgttgttgcatctgttctggttttctctcttgctggctgcggtgacaaagaagaatcgaagaaattcagcgccaatctgaacggcactgaaattgccattacctatgtctacaaaggtgacaaggtgcttaagcaatcttctgaaaccaaaattcaatttgcctccattggtgcaaccaccaaagaagatgctgccaagacacttgagccgttaagcgccaaatacaaaaacatcgcgggtgttgaagaaaaattaacctataccgatacctacgcgcaggaaaacgtgactatcgatatggaaaaagtggattttaaagccctgcagggtatttcaggaatcaacgtttctgctgaagatgccaaaaaaggtatcactatggcgcaaatggaactggtgatgaaagccgctggttttaaagaagtgaaataatcggttggcggtcatgctctaaacatgaccgccaattttttagccttttttcacatgctggcgcgctgccagtccacgcagaaaataacgtaaaaattgatcgccgcattcgcggaagtttttatgatccggtgcgcgcatcatcgctgtaatttccggcatcgaaacgcggaactgctgttcggtgaggatagccagaatgtcatcggttttcagcgaaaacgcgatgcgtaattttttcagcacgatgttgttattaatgcgacgttccggctccagtgccggagcagactcatccttgccgcgtttttcataaatcaggccattgaggaatgacgacaaaacaatgtccggacaacgctgaaaaccctcttcgtcttctttacgtagccagacggcgatctgttccgcggtggcttcgacattacccagcgccagaatacgcaccaggtcattattattggctttcaaaatgtagcgcacgctgcgcagaatatcgttacttagcatgaggccttcaggtgttgatgaggcaaaaagccattttagcagtcttttacaggccaatcgcctcttttaagcttttcagataacggcggctgaccggcacggttaagccattacgcaaaatcaactcggcctggccgttatcttccagacgaatctcctgtaaatgcgcgaggttaaccagatactgacgatggcagcgcagtagtggtgtacgactttccagggtacgtaatgtcaattcggtaaagccctctttcccttcgtggctggtaacgtagacaccgctcatccgactgctgacaaatgccacatctttcatttgcagcaaataaatccgactatgccccgtacaagggataaatttcagcgcctgttgattttccggtaacagcgaaacatcctgcttgctgcgctcctgacgcaatcgcgccagcgttttctccagtcgcgcttcatcaattggcttcagcagataatcaaaggcatgttcttcaaaggctttaattgcgtattcgtcaaacgcagtgagaaaaacaatatacgggcgatgttccgggtcaagcatccccaccatttccagaccactgatgcgcggcatctggatatcgagaaacagcacatccgggcgcagtttatgcaccgcgccgatcccttccacggcgtttgaacactctccaacgatttcaatatcgctctgctcctgcaaaaatacacgcaggttctcccgtgctaacggttcatcatcgacaattaagactttaatcatgcctcgtccctccatggtagtcgtaacgttattcgggtgtaactatcaggctcacaggcgacgcttattccatagtcatcgccaaaccgttcacgtaaacgcttatccaccagattcatccccagcccactggcattggttaccggttgatacaaaccggcattgtcttcgatctccagcatcaaatgttgcccctcacgtcgggcgctgattgccactcgccctgtatccagcagttgtgatgtcccatgtttaatggcgttttccactatcggttgcagggtaaacgcgggcaattgctgctgggataattcttgcggaatagcaatgttgacctgcaaccgcgactggaagcgcgccttttcaatttgcagataagcattcacatgttcaatttcgtcggcgagagtaacaaactccgaaggccgctttaagtttttgcggaaaaaagtggaaagatactgcaccagctggctggcctgttcgctgtcgcggcggatcaccgctttaatggtgttaagcgcattaaacaaaaaatggggattcacctgggcgtgaagcagtttgatctctgactgggtgagcatcgctttttgccgctcatattgcccggcaaggatctgcgccgaaagcaattgcgcaatcccctcacccaacgtgcggttgattgaactgaataaacggtttttggcttcatacaatttgatggtgcccatcacccgctgattttcaccacgcaacggaattaccagcgtcgaccccagtttgcattgcggatgcaaagagcaacggtaaggtacttcgttgccatcagcgtagaccacttcaccggtttcaatcgcttttaaagtataagttgaagaaatcggtttgccgggtaaatggtggtcgtcaccaattccggtaaaggccagcaatttctctcgatcggtaatcgcgactgcaccaatatccagttcctgatacagcacctgagccactttcatgctgttcacttcgttaaacccctggcgcaaaatgccttccgtcgaggctgccactttcagcgcagtggcagaaaaagccgaagtgtatttttcaaacatcgcgcgtttatcgagcaatatacgcataaacagcgccgcgccgacggtattggtgaccatcattggcgcagcaatattactcaccagacgcaccgcatcttcataaggtcgggcgatcgcaaggatgatcagcatttgcaccatttcagcgacgaacgtgacggcaccggcggtaatggggttaaagactttatcagtgcgcccgcggcggatcaggatgctgtgtaccaggccaccgagtaatccttcaacgatggtcgagatcatgcaacttaacgcggtcatgccccccatcgaatatcgatgtaagccgccggtcagcccaaccagcccaccgacgaccggaccgccgagtaagccgcccattaccgcgcctatcgcacgggtattggcaatagaatcgtcaatgtgcaacccaaaccaggtgcccatgatgcagaagatggaaaagacgatgtagcagagaaatttatgcggcagacgaaccgtgacctgcattaacggtatgaataatggcgttttactcattaaccatgcaatgactaaaaaaacgcacatctgctgaagcagcagcaacaccagattaaaatcgtacatacccgcaaaccacacttccctttaaaacgcgtaacatacattgcctgcgtttaactttctttgaactcttgcagaaaaatgagaattcgtgagtacgatcactcaaaatcgcctggcaaaaataaaatcaccctatagatgcacaaaaaacgggcaaaactacctggttcgcaaaactgcgtctaaagttaaaccgggacctcgcgagcaagggtgagacgatggcgctttacacaattggtgaagtggcgttgctttgtgatattaatcctgtcacgttacgcgcgtggcagaggcgttacggattgctgaaaccgcaacggacagacggcggtcatcggctgttcaacgatgccgatattgaccggatccgcgagatcaaacgctggatcgacaacggcgtgcaggtcagcaaagttaaaatgctgctcagtaatgaaaatgttgatgtgcagaacggctggcgcgatcagcaagaaacattactgacttacctgcaaagcggcaatctacatagcctgcgaacgtggatcaaagagcgcggtcaggattaccccgcccagacactcaccacacatctgtttattcctctgcgccgacggcttcagtgccaacaaccgactctccaggcgctgctggcgatcctcgacggcgtactgatcaactacatcgccatttgtctggcttcggcacgtaaaaaacagggtaaagatgcgctggtggttggctggaatattcaggataccacccgtctgtggctggagggctggattgccagtcaacaaggatggcgcattgatgtcctcgcccactcgctcaatcaactacgccctgaactattcgaaggccgtacattgctggtgtggtgcggtgaaaatcgaacctccgcccaacagcagcaactcaccagttggcaagaacaaggccatgatattttcccactcggcatttaatgattcgttaacaaatgcgctttactgtacaatcctttcgttaacataaggagtgcattatgcgcatagctaaaattggggtcatcgccctgttcctgtttatggcgttaggcggaattggtggcgtcatgctcgcaggttatacctttattttgcgtgctggctaagcgcctgcaccagcctttcaaacaggcggtctgcgatgatcgccgccagtgccaccagtaacgccccctggatcacatacgcggtattaaatccgctaagcccgatgatgatgggcgtacccagcgtgctggcccctaccgttgaggcgatcgtcgccgtaccaatgttgataatcaccgaagttcgcacgcccgccagaatcaccggagccgccagcggtagctcgaccttacgcactcgctgaccacgactcattcccatacctttcgcaacttctgtcacgctggcatcaatcgctcccagcccggcaagtgtcgcctgcaggacgggcagcacaccgtaaaggatcaaggcgataatcgctggttgcagaccaaagccgatcaccggaacggcgatcgccagcactgcgacgggcggaaaagtctgtccaacggcggcaatagtttccaccagtgggcgaaattccgcgccccacgggcgagtgacagcaattccggcaccagtgccaatgatcaccgcaaacaaactcgaaattcccaccagccagaaatgagccagtgccagagctgcaaaactttcttgctgataaacgggtcgtggcagttgtgggaacaaggcagcaaacagcggctggctgtaaggcagccagaaaatcagcgccacaaacagagcaatgagccagaacagcggatcgcgcaacatcttcatacgcttacgcctccaccagcagatcctgaaaatgcagcgtgccgcaaggctggccctgcatgttcaccaccggcagcacctcgcatccccgcgcaacaaacagagagagcgcatcgcgtagcgtcatctcttctgccagtgcctcaccatctgctcgttcttcgcgacgcacgtaatccgccacactacgtaacgaaagcaggcgcacacccagttcactacgtccaaaaaactggcggacaaaatcattcgccggacgagtcagcatcgtcagcggattgccctgctgcactacttcaccgtgatccatcaataccagatgttctgccagccgtagcgcctcatcaatatcatgagtgaccagcacaatggtacgccccagcaaacggtgaatgcgcgtcatctcttgttgcaacgcgccgcgcgttaccgggtccagtgcgccaaaaggttcatccattagtaagacttgcggatcggcagccagtgcacgcgccactcccacacgttgctgctgaccaccggaaagctgatgcggataacgctcacgcaaatttgactccagccccagtagcgccattaattcgtcgatacgatcgtcaatccgcgcccgcgaccatttttgtaattgcggcacggtagcgatgttttgcgccacgctccagtgggggaacaggccaatagattgaatggcatagcccatccggcggcgcaactccagtactggcagcgagcgaatttcttctccggcaaagcggatctctccgctgtcatgctccaccaggcggttaatcattttcagggtggtggatttgccggagccagatgtgccaatcagcaccgaaaaactcccttcctgaaaattgagattgagatcgttaacggctttttgtgcgccgaacagtttgctgacatggctaaattcaatcattacgtttcaccttcagcagtgcgataagcaaatcgaacagcgcgtcggtaagcaccgccagaacaattaccgggatcacccccagcaacactaaatcaatggcgctgcttagcagcccctggaaaaccagcgcaccaaaaccgcctgcgccgattaacgccgcaatcaccgccatacctacagtttgcaccatcaccacccgcaggctgcgcagaaataccggtaacgccagcggtaactgaacatgcaggaaacgctgcgccccgctcatccccatcgctctggcgctttccagcacatcgcgcgggatctggttcaaaccgactaccacgccgcgcaccagcggcagcaaggcatagagcaccagcgcaatcagtgcgggtgtcattccggttcctgctatgccgagcgtccccagccacggaaaggccgtaaccagcgcggcaagcggcgcaatcaacaggccaaagagcgccaccgaaggcacggtctgaatcacattgagcagagaaaaaattgccccctgccgagcagtggaaaagtagcaccagatgcccaacggcacaccaatcactaacgcaggcagcaccgcaccaaacagcaacgtcagatgttgtgccagcgcgtcgtcaaacacatcctgacggttggcgtattctttcattagtgagagatcgttaagcgtgccggagtacagcaaccacagcggaataatggcaatctgcatatgcaacaaccagcgccacagcggatgcgtggagattcggcggatggcatcgctacaggccagcaatgccagcgccgcagccagccagaaaccactgccgaggctggtacgcgccagcgcactgccattttgcgccagttgggtcgccgcctttccagctccccacaccagcaatacgaagacgaattgcgccagaatgagtgcacaaatgctgccttttttaccgggaataaaacaggccgtcagccaggcgcaaccaacgcccaccagcatccagatcgtttgcggccacagctgccagagatgacgcccctcacccgaaactaaacgattaggcgcgtaactgataaacggcagcgccgctgcgattgccgtcagcaacagcagcagcgccagaacaggattaatacggaaataagtcacgggaaattacttcgtccaccctttttgtttcaggtagtcggcagccacttttttggcatccagtccttccacagcaatgctggcattcagttgctgcaatgtttttgcatcgaggctggcgaagactggctgtagccactgtgccatttgcggatactccctcaacaccgactcacgcaccactggtgcaggcgcgtagataggttgcacaccttgcggatcgcttaaggtttgcagccccagcgccgctaccgggccgtcagtgccgtaagccattgcagcattaacgccagaggtttgctgggcagcggctttgatcgtcaccgccgtgtcgccaccagccagtgacagcaactgatcctgaccgagcttaaagccataggctttttcaaacgcgggtaacgcatcggcgcgttcgataaactctgccgaggctgccagtttgaaggtgccgccctcttgcagataacgactcaggtcggcaagcgaagtgagtttatttttctctgccacatcctgacgcacggcgatagtccaggtgttatttgcaggcgcgggcgtcagccagattaacttgttgtgctccgaatcgagctttttgactttctcgtaaccttgctgcgcgtttttccacgctgcatcgttttcatctttaaagaagaaagcgccattgccggtatattccggatagatatccagttcaccggaagtaatcgccccgcgcaccacaggagtcgttccgagttgcactttattcaccgtcggtacgccgtggctttccagcacctgcaaaatgatattgccgagtagcgcaccttcggtatcgatttttgaaccgactttaacgggggaagccgcctgtagcggcaggctcacggctgccaacataaccagtgaacctgcccagagctttaagagtggcatgatgctttcctcattcttttactgttgttttcagcgaattaagagaaaagcatagttgataatggcggggttagcttgagcggaaggattcagttgcagaatcagataaatacttaagaggcatattcggtccggcgtttcctgccggatgcggcgcgagcgccttatccggcctacaaagggcgcaaacgtcgcgcccttactaaagcattacagcaactcaaactcgcctttcttaacgcgtgcggaatcagtgccgataaagacattgaacttgccaggctcggcgtcatatttcatctgttgattccagaacttcagcgcctcaatatcgatcgggaagctgacagtctgagtttcgcccggtttcagggtgattttctcaaagcctttcagctgtttcacagggcgactcatggaagccgtcacatcctgcaagtacatctgcactaccgtggcaccctcgcgcttaccggtgttcgtcacctgcacgctggcagtcactttgccgtcacgcttcatggtcggcgcagaaagtttcacatcagagacggtgaaagtggtgtagctcagcccatagccgaacggatacaacgccccgttagcttcatcaaaataacgcgaagtgtatttgttcggcttgtcggcattatacgggcgaccggtattcagatggctgtagtacaccgggatctgcccgacagaacgcgggaaggacattggcagcttgccggacgggttgtaatcgccaaacaatacatcggcaattgcattaccgccttcagtccccgcaaaccaggtttccagaatcgcatcagcctgctgatcttctttcaccagcgccagcggacgcccgttcatcagcaccagcaccagcggtttaccggtggctttcagcgccgcaatcaagtcacgttggctttgcggaatagtgatatcggtccggctggaggcttcgtgcgccatcccctgtgcttcaccgactacagccaccaccacatcagattgtttcgccgtctgcaccgcttcatcaatcatctcttgcggcgaacgcggatcgactttgaccgcttcttcatactgattcaggaaatcgataatgcctttgtcactggtaacgttcgcccctttggcatacagcactttaccgttttcaccgacggcatttttaatcccggtcagtacggtcacggattgatcggcaacaccggctgcggaccagctgcccatcacgtcacgtttactgtccgccagtggcccaaccaccgcaatggtggccgattttttcagcggtaacgtttcgagacggtttttcagcaacaccaagctttcgcgcgccacttcacgcgcttctttacggtgcaggcggctttcggcattggtatccaccgggtcagactctttcggccccaaatggctgtatgggtcgttaaacaaccccatatcatatttaacgttcagtacatggcgggcagcatcgtccagctctgccatcgtcactttgccggatttaatcaacccaggcagatacttcgagtagtactcgtcgctcatgctcatgttgattccggatttcagcgccacgcgcaccgcatcttccgggtctgccgccgtgccatgtttaatcagctctttgattgcaccgtgatcggaaacggtgatgcctttaaagccccactggtcgcgcagaacatctttcagcagccaggaatcggaggtggctggcgtgccgttcagcgagttcagcgccaccatcaccgcgccgctgcctgcgtccagccccgctttgtacggcggcatataatcattaaacaggcgctgcggactcatatcgacggtgttgtactctttaccgccttctaccgcgccgtatgcggcaaagtgtttgacgctggtcatcaccgagtagcgatctgccgggcttttaccctgcatcgcttccaccatggttttacccattgttgaggtgagatacgtatcttcgccaaaaccttcggaagcacgtccccagcgcggatcgcgcgagacatcgaccatcggtgcccaggtcatattcaggccatcatctgccgcttcataagcagagacacgtccgaccgttttcactgcatcgaggttaaaagacgaggccagaccgaggctaatcgggaacaccgtgcgctgaccgtgcagcacgtcgtaagcaaagaaaagaggaattttcaggcggcttaattccatcacctgatcctgcatggcgcggatatcctgacgggttacggtgttgaaaatcgccccaacctgaccgtctttgatcatctcgcggatcgcctctttcgggttatccgggccgacgctgattaagcgcagctgaccaattttctcatcaactgtcattttcttaagcagttcggtgacgaacgcatcccgcgcttcgggcgttaatggatggttgccgaataaatcatccgccagtgctggctgcagggccagactcaccgcgattcctactgaacatagccatttcatatggatttttcttcctttgttgcccgacgtggcagcgaaaatggtgcaaaaaccgtagtttgccataagcatgatggagagagaaaaagaatgctcagtttattgtctgaattttcaaaatattcactcgctgaattgttatacaaggcgctattctagtttgtgatattttttcgccaccacaaggagtggaaaatgtcttccatgacaacaactgataataaagcctttttgaatgaacttgctcgtctggtgggttcttcacacctgctcaccgatcccgcaaaaacggcccgctatcgcaagggcttccgttctggtcagggcgacgcgctggctgtcgttttccctggctcactactagaattgtggcgggtgctgaaagcctgcgtcaccgccgacaaaattattctgatgcaggccgccaatacaggcctgaccgaaggatcgacgccaaacggtaacgattatgatcgcgatgtcgttatcatcagcaccctgcgtctcgacaagctgcacgttcttggcaagggcgaacaggtgctggcctatccgggcaccacgctctattcgctggaaaaagccctcaaaccgctgggacgcgaaccgcactcagtgattggatcatcgtgtataggcgcatcggtcatcggcggtatttgtaacaactccggcggctcgctggtgcaacgtggcccggcgtataccgaaatgtcgttattcgcgcgtataaatgaagacggcaaactgacgctggtgaaccatctggggattgatctgggcgaaacgccggagcagatccttagcaagctggatgatgatcgcatcaaagatgacgatgtgcgtcacgatggtcgtcacgcccacgattatgactatgtccaccgcgttcgtgatattgaagccgacacgcccgcacgttataacgccgatcctgatcggttatttgaatcttctggttgcgccgggaagctggcggtctttgcagtacgtcttgataccttcgaagcggaaaaaaatcagcaggtgttttatatcggcaccaaccagccggaagtgctgaccgaaatccgccgtcatattctggctaacttcgaaaatctgccggttgccggggaatatatgcaccgggatatctacgatattgcggaaaaatacggcaaagacaccttcctgatgattgataagttaggcaccgacaagatgccgttcttctttaatctcaagggacgcaccgatgcgatgctggagaaagtgaaattcttccgtccgcattttactgaccgtgcgatgcaaaaattcggtcacctgttccccagccatttaccgccgcgcatgaaaaactggcgcgataaatacgagcatcatctgctgttaaaaatggcgggcgatggcgtgggcgaagccaaatcgtggctggtggattatttcaaacaggccgaaggcgatttctttgtctgtacgccggaggaaggcagcaaagcgtttttacaccgtttcgccgctgcgggcgcagcaattcgttatcaggcggtgcattccgatgaagtcgaagacattctggcgttggatatcgctctgcggcgtaacgacaccgagtggtatgagcatttaccgccggagatcgacagccagctggtgcacaagctctattacggccattttatgtgctatgtcttccatcaggattacatagtgaaaaaaggcgtggatgtgcatgcgttaaaagaacagatgctggaactgctacagcagcgcggcgcgcagtaccctgccgagcataacgtcggtcatttgtataaagcaccggagacgttgcagaagttctatcgcgagaacgatccgaccaacagcatgaatccggggatcggtaaaaccagtaaacggaaaaactggcaggaagtggagtaaaaattacggatggcagagtatcgccatccgaattcacttaatcgttctgtgccgtctgccccgccgccgccatttgggcggctttttgttttttatagctcaacgctgctgccggcacaggcatcactttaccggtttcaatccaggtacgcaggcggctggcatcggcaaaatgggtatatttgccaaacgcgtccatcactaccagcgccaccggtttattattgataaccgtacgcatcaccagacaatggcccgccgcattggtaaagccggttttggttaactgaatattccagttatcgcgatacaccagatgattagtattgcggaacggcagcgtatacgtcggattagagaaggttgccatatcttcccgggtagtacttaactgcccgatcaacggatattgtttgctggcaatgagcagtttggttaagtcacgggcagttgaaacgttatgcaccgacaatccggtaggttcaacaaagcgcgtgttgttcattccgagcgatttcgctttcgcattcattgccttaataaaggctttgtaaccaccgggataatggtgcgcaaggcttgccgccgcgcggttttctgaagacatcagcgccagcaacagcatatctttacggctgatttcgctattcagtcgtacgcgcgaatagacccctttcatctccggcgtctggctgatatccacttttagtttttcatccagcggcagtcgtgcatccagcacaaccatcgcggtcattaatttgctgatagacgcaatcggacgcaccagatccgggtggttcgaatagatcactttgttggtattcagatcaacaatcatcgcgctaccggaggcaatttccggttgtgaagcggtggtagcggctgccgttttcgcaacggcctgcggtgcaaaaggcacagccagcatcagggccaggctaaataaagaaactcgaaatttcggcatgatgagcattcagatagtggttcacgcgcacgggttgcgcaccgccggagtaaggatttactgaggctagcgacgccatcataacgagcaaaaagtgcgatcgtcaaaggagaatcgtgaggaaatgctgcattgctgacatttacgccagcaatgcaacgtcaaagaactttctagaacaaacgataaccgtagccccatagtataacggttagggcgagcagcacttccagtaccagcacgccaatcgccagcgtcgaactagagaagctaaggccttcctctttgttgatattcaggaagctcggaataccaaggtaaagcaggtagccggtgtaaaacagcgccaccgtgccgaccagcgcacacaaccagaccagtggataaagcgccaccagaccgcttaaaaacagcggagttgcaacgtagcccgcgaagaccatgcagtgcgcaagtgacggacgctgcggataattacgcgccatccaccagatgacccgccccatcaccgcgaccccagccagcataacgccgtaaaacaagacagccagcgccagtccggtaaaccaggataacttcaggatagtgccatcgccaaaattccagccaatctgtgtagtgccaatgaaggcgcaaatcaccggaatcgccgccatcagcaaaacgtggtgggtgtaatggtgagaaatcgtttcgttttcgcgattaatcacctgcatttcacgatcgggatgggaaaacagtccccagacatggctcataccgcccccttgttgtgagttcatgaacctgacagttcaagtataagtcagcttgtgattattttttgttcgcccatgtaattttcactgtctgatgaacgtcctttttcagcgtgaatgattcacagggtgtatgcttactggcaaccaaagggagacagactggcctatggatctcaatacacttatctcacaatatggttatgccgcgctggtgatcggtagcctggcggaaggtgaaaccgtgactttgctgggaggcgttgcggcgcatcaggggctattaaagttcccgctggtggtactttctgtggcgcttggcggcatgattggcgaccaggtgctctatctgtgcgggcggcggtttggcggcaagctgttacgccgtttctcgaaacatcaggataaaattgagcgggcgcagaaacttatccaacgccatccgtatctgtttgtcattggtacgcgctttatgtatggctttcgggtgattggcccgacgctgattggtgccagccagctgccgccgaaaatctttctgccgctgaatattctcggcgcatttgcctgggcgttgatttttaccactattggttacgctggtggtcaggtgattgcgccgtggttgcacaatctcgaccagcatttgaagcactgggtctggttgattctggtcgtggttctggtggtgggcgtgcgctggtggctgaaacgacgcgggaagaaaaagccggatcatcaggcgtaaaaccattgccctggataaggcgttcgcgccgcatccgacatccggagtaccatgcctgatacgacgcttgtgcgtcttttcatgccgaccaaaatattacccaatgaaatatccacgcacctcactgcgctattctgggttgaactgtggattcgccaacataaagccgccatccactatcaacgactgcccggtggtgtaatttgcgccctccgaacaaagccacaccaccaggctggcaatctcatgcgttgcgccaaaacgccgcaagggaatcgaaggctccgcgtcgggcttcacgtcgctgtcatccatgccattcattggcgtggcgatcgccccaggcgcgactgcgttcaccaaaatcttatgcctgaccagctccagcgccatcgctttggttaacccaccgagcgcatgtttagcggctgtgtaggcgctggcatccggcagcggcgtatgttcatgtaccgacgtaatgttgatgatgcgaccgccctgcccttgtttcaccatctgacgagccgcaatttgcgagcataagaatgcaccatcgacatcaacggtaaaaatcttgcgccactcatcaaaagccatatcaagaaacggcgctttggtcattgcacccgcattattcaccagcacatcaatgcgccccagccgttgaatgagtttctccagcgccagtgccccttctggtagattgccgagatccagctgcacgatctccgcacgtacgccgtggctaactacctcacgcgcggtatcttttgccccttcttcatctgagtgccaggtaataccaatatcaaacccctgctgcgccagtaataacgcgcactctttgccgatccccgaatcggaggcggtaataatcgcaacctgtgccatcgagttctccacttaacgctgaataaacgttaagtatagaaggcgcatatcatcagcgtttgtaccccccgcccaacgcaccagtgagttgaatggaggcatccagccactgcccttgcaataacaggccattggcccgctcacgcagcgcggggattctggcttcgctgacgcgggaaccagcaatgatgcccgcgttaaagcgcgcctgcgcaagacctaccacacgcaaggcatcgcgctcaatttgcgcctgatgctggtttttctccgccagtgtctgaacctgactggctgcccgcgccacgtcattcaccgcttcaaccaccgctttgttgtagctggcgatagacaagttgctttcggcttttgcgatatcgagattggcgttaagacgaccactatcgaaaatgggtagcgtcaggcctgccgtaacgcccatttgctgcgcggaatgacggaacagatcgcttaagtgcaacgcatcctgttgcaggaaggccatcaggttgatgtcaggataaaatgccgcttttgccgcatcaatggtgcttagcgatgactcaacgtaccagtgcgccgcctgcaaatctgcccgccgggccagtaaggagtaccccagttcatcaggaagctggcttgccactttcggcaacgcgaccggtttaagcttcaatgactttgtctggttatttgtaagtgcgcttaaccgtgcctcaataattttcattttccccgcgacatcgttgagctgctgccgggttttgctggcattaatatcggtttccacaccttcaactgaagaagtaatcccgttctgatatagctggcgatcggtcgcgataatggtgttctgctctttttctatttgctgcaagaccgtgtttaacgccgcctgggtttgccactcccagtacaggcgggctacgctgccagccagcaattggcgggtttgctcgcgttccgccgcccgtgctttaaccgtacccaggcgggcagtaacctccgcccgattctttccccagatatcgagatgccagcccgccgttaagccaaaagtaccgttggtgtaccacgggccggtcgtacctgcggccggatcgttcagagcaaacggccccattaagccttctgccgacattttttgccgctccatatccgccgaaaagtcgatctgcggaccatcctgagtggcaactgccttcgcctgggcttcagctagctgaatgcgctgttcagccacctgcatatccggtgcgttctgtagtgcattgttaattaaggaagtgagttgattatcgtgatactccagccaccattggctgtctggccaaccattttcagcgccgtgggtaatgcggtgtcaacttgtgcagcgggcgtttgctggcttaacgcctggcgggtttcatgcataggcgcacacccggccagcatcagtaacagcggaaaacaggcgatggctggataaaaggaatcacgattcatgggggaataatcaggtaagaaaaggtgcgcggagattaccgtgtgttgcgatatattttttagtttcgcgtggcaatacatcagtggcaataaaacgacatatccagaaaaatatacactaagtgaatgatatcttccgatttatcttaatcgtttatggataacggcaaagggcttcgttttttcctatacttattcagcactcacaaataaaggaacgccaatgaaaattatactctgggctgtattgattattttcctgattgggctactggtggtgactggcgtatttaagatgatattttaaaattaattaatgtcatcaggtccgaaaataacgagaatatttcagtctctcatcctgttgcgctcctgtcatgtgcattgcttcatataatcactggcgcaaggagcgcgcagggggcggccaatcgccgccgccccctgcacccccgggctctggcgaacaaaatcgccgctgcgcggtgccctcggcttatcccttacggctaccgggtcgggcgcgaggtaacatccctgtaaaacgcgccctcagcccacatccatgtgggctgccccggccttcagggaacgcctcggcaattttgacgccaccaaacaaccgtgcggcctattgataaagagctaacacattgtcaaaaaacatcactatggttttttagagtttctcgatatcaattgcctgaatagcccttgcaatatcaggggaattattcaacacccgaacatgctgaaataattccgttgcttcatcgtattctttacgcaaataactcaaccactgtttaatccgcgcaacgtgatataacccggtatcgccctgcttttccagacgggtatatttttgcagcaaagcaaccacctccggccacggcattcgcggttcgttatattttaccacccggctcaggttgggaatattgagcgccccgcgaccaatcatcactgcgtcgcagccgctgatcgccatgcattgttgcgcgctctgccagtcccagatttcaccgttggcaatcaccggaatattcagccgctggcgaatatcgccaatcgcctgccagtcaatatgctccgcgcggtaaccctgctctttcgtccgcccatgcaccaccagctccgtagcgccagcctgttgaaccgcatcggcgatttcaaatttcttctcaccgctgtcccagcccagacgcactttcacgctgacgggcaaatgcgccggtacagcttcacgcatcgcttttgcaccctggtagatgagttcaggatctttgagtaacgtcgccccgccgccgctaccgttaaccgttttcgacgggcagccgcaattgagatccacgccccaggaacctaactccaccgcacgggcggcgttctctgccagccattgtgggaactgacctaacaactgcacgcgcaccagcgtaccagatggtgtccggctggcgttttgtagctcagggcaaatgcgatgaaagacttttaccggcagcagttgatccaccacgcggacaaactcggtgatgcacagatcgtagtcgttaacttcggtcagcaattcacgcaccagagagtcaagcactccctccatcggtgccagtaacacacgcatatcatcacccgcaaaaaaatgaggcgctatgttagcgcctatggtcagcggattaaaggtctgcaaagagggattgctgcaaactgcaatccctctctatgcttgatgtatgcctgagttcgctgcgcattgcgtaatgccggggagcgaaaaaataagcgctgatttcttaatgtgatcggtagcacgttttacgaattaattgtatgatgaatccatctcatctggggtgttgattatgagtaagacactgaacattatctggcaatatttacgcgctttcgtcctgatttatgcctgcctgtatgcaggcattttcattgcttccctgctaccggtaaccattccgggcagcatcatcgggatgctgatcctgtttgtcctgctggccttgcaaattcttccggcaaaatgggtcaatccggggtgctacgtactgattcgctatatggcgctattgtttgtgccgattggcgtaggcgtcatgcaatattttgatttgctccgcgcacagtttggcccggtagtggtttcctgtgcagtcagtacgctggtggtttttctggtggtgagctggagttcgcaactggtacacggtgaacgtaaagtcgtaggtcagaaaggatcagaagaatgatggcgaatatctggtggtcattaccgctgacattgattgtcttttttgccgcccgcaaactggcggcacggtataagtttcccttgcttaacccgttgctggtagcaatggtggtgatcattccttttttaatgctgactggcatctcttacgacagctactttaaaggtagcgaagtgctaaacgatctgctgcaaccggcggtcgtcgcgctggcctatcctttatatgagcagctacaccagatccgcgcgcgctggaaatcgatcatcaccatctgttttatcggcagcgtggttgcgatggtgacggggacttccgtggcattgttgatgggcgcttcaccggaaatcgccgcgtcaatcctgccgaaatcagtcaccacgcctattgcaatggcggttggcggcagtattggcggtattccggcaatcagcgcagtttgcgtgattttcgtcggcatcctcggcgcggtatttggccatacattgcttaatgcgatgcgtattcgtaccaaagctgcgcgcggtctggcaatggggactgcctcgcacgccctcggtacggcgcgctgcgccgagctggattatcaggaaggtgcatttagttcgctagcgctggtgttatgcgggataattacttcgctgatcgcaccgttccttttcccgattattctggcagtaatgggctaaaatttgcgatgcgtcgcgcatttttgatgtatgtttcacgcgttgcataattaatgagattcagatcacatataaagccacaacgggttcgtaaactgttatcccattacatgattatgaggcaacgccatgcatccacgttttcaaaccgcttttgcccaacttgcggataacttgcaatctgcactggaacctattctggcagacaagtacttccccgctttgttgaccggggagcaagtctcatcgctgaagagcgcaacggggctggacgaagacgcgctggcattcgcactacttccgctggcggcggcctgtgcgcgtacgccattgtcgaattttaatgttggcgcaattgcgcgcggtgtgagcggaacctggtatttcggtgccaatatggaatttattggtgcgacaatgcagcaaaccgttcatgccgaacaaagcgcgatcagccacgcctggttgagtggtgaaaaagcgcttgcagccatcaccgttaactacacgccttgtggtcactgccgtcagtttatgaatgaactgaacagcggtctggatctgcgtattcatctgccgggccgcgaggcacacgcgctgcgtgactatctgccagatgcctttgggccgaaagatctggagattaaaacgctgctgatggacgaacaggatcacggctatgcgctgacgggtgatgcgctttctcaggcagcgattgcggcggcaaaccgttcgcacatgccttacagtaagtcgccaagcggtgtcgcgctggaatgtaaagacggtcgtattttcagtggcagctacgctgaaaacgccgcattcaacccgactctgccaccgttgcagggagcgttaattctgttgaatctcaagggttatgattacccggatatccagcgcgcggttctggcagaaaaagccgatgcgccgttgattcagtgggatgccacctccgcaacgctgaaagctctcggctgtcacagtatcgaccgagtgcttctcgcttaagcctggtgccggatgcggcgtgaacgccttgtccggcttgccagccctctcctggtgtcgaaattcccggcaaacagtttgccgtttcttgcgcaaaaccagcgggtaaagtagcctgatggaaattttccttagatcgagtctcctgcatgttaaagcgcgtgttcctcagcctgttagtcctgatcggcttgctgctgttgactgtgctcggcctcgatcgctggatgagctggaaaaccgcgccttatatctacgacgaattgcaggatctcccctaccgccaggtcggtgtggtgctcggaacagcaaaatattatcgtactggcgtaattaatcagtattatcgctaccgcattcaaggagcgattaatgcctataacagcggtaaggtaaattatctattactgagcggcgataacgcattgcaaagttataatgagccgatgaccatgcgcaaagatttaatcgctgctggtgtcgacccatcagatattgttctcgattacgcaggctttcgtacgctggattccatcgtgcgtacacgcaaagttttcgatactaatgatttcattattatcacccaacgtttccactgtgagcgagcattatttattgcgctgcatatggggattcaggctcagtgttatgccgtaccgtcaccgaaagatatgctgtcagtacgtattcgtgaatttgccgcccgtttcggtgcgctggctgacctttatatttttaaacgtgaaccgcgttttttagggccgctggtccctattccggctatgcaccaggtaccggaagatgcgcaggggtatcccgccgtcacacccgaacagttacttgaattacaaaagaaacaaggaaagtagttatggatgtacagcagttttttgtcgttgccgtttttttccttatcccgatattttgtttccgcgaagcatggaaaggctggcgcgcaggcgcgattgataaacgggttaaaaatgcaccggaaccggtgtatgtctggcgagcaaaaaatcccggactctttttcgcttatatggtggcatatatcggcttcggaattttatctatcggcatgattgtttatcttattttctatcgttaatattcccctctccagttaattattgagaataattattacttcacctgataagctgcggatatcacattcctaaccgcagctatttgtgaatcttttcacagtttaaattcccccgcacgcttagccttaatatcagtacattattatttactaaacgctcgccttaattacctatagcattaaggaagatcacatgccgcaacaaaattatctggatgaactcactccggcttttacgtctttactggcgattaaagaagcctctcgctgtttattatgtcacgacgctccctgtagtcaggcttgcccggcacagaccgatccggggaaatttattcgctcaatctactttcgtaattttaaaggcgctgccgagacaattcgcgaaaataatgccctcggtgccgtttgtgccagagtgtgcccgacggagaaattatgccaaagcggttgtacccgtgccggtgttgatgctcccattgatatcggccgcttacagcgttttgttactgattttgaacaacaaaccggaatggaaatttatcagcccggtactaaaacgctcggcaaagtcgcgattattggcgcaggtcctgccggattgcaggccagtgtgacactgacaaaccagggttatgacgtcacgatttatgagaaagaagcgcaccccggtggctggttgcgtaacggtattccgcaattccggttaccgcaatcagtgctggatgcagagatcgcccgtattgaaaaaatgggcgtgaccattaagtgcaacaacgaagtcggtaacacactcacccttgagcagctgaaagcagaaaaccgcgcggtactggtcaccgtggggttatcaagcggttccgggctaccgctgtttgagcatagtgacgttgagattgccgtcgacttcttgcaacgtgcacgacaggcgcaaggcgatatcagcattccacaaagcgcattaattatcggcggcggtgatgtcgcgatggacgtagccagcacgctgaaagttctcggctgtcaggcggtaacttgcgtagcgcgtgaagagttagatgagtttccggcaagcgaaaaagagtttaccagcgcccgggagctgggcgtttcgatcatcgatggattcacgccagtagccgtggaaggcaataaagtcacgtttaagcatgtacggttatcgggcgaactgacgatggcggcagataaaattattctcgccgtcggtcagcatgccagactagatgcctttgcggagttagagccgcagcgtaacaccatcaaaacacaaaattaccagacccgcgacccgcaagtctttgctgctggcgatattgttgagggtgacaaaaccgtggtctatgccgtgaaaaccgggaaagaagccgccgaggcgattcatcactatttagagggagcttgctcatgttaacgaaagatctttcgattactttttgcggcgtgaagtttcccaacccgttctgcctctcttcttcgccggtaggcaactgctatgagatgtgtgccaaagcctacgacacaggttggggcggtgtggtgtttaaaacgatcggcttttttatcgccaacgaagtctcgccgcgttttgatcatctggtgaaagaagataccggttttatcggcttcaaaaatatggagcagattgctgaacatccgttggaagagaatctggccgccctgcgtcggctgaaggaagattacccggacaaagtattgatcgcttcgatcatgggggaaaatgagcagcaatgggaggagctggcgcgcctggtgcaagaagctggcgcggatatgatcgagtgtaacttctcctgtccgcaaatgacttctcatgcgatgggtagcgatgtcgggcaaagcccggagctggtagaaaaatattgtcgggcagtgaaacggggttccacgctgccaatgctggcgaagatgacgccgaatatcggtgatatgtgcgaagtggcgctggcggcgaagcgcggcggcgcagatggcattgcggcgattaacaccgttaaatccatcaccaatatcgatcttaatcagaaaatcggtatgccgatcgttaacggaaaatcgagtatttccggatattccggtaaagcggtaaaaccgatcgccctgcgcttcattcagcaaatgcgcacccatccagaactgcgcgatttcccaatcagcggtatcggcggcattgaaacctgggaggatgcggctgagtttttattgctcggcgcagcaacgttacaggtgaccaccggcatcatgcagtacgggtatcggatagtggaagatatggcaagcgggttgtcgcattatctcgccgatcagggatttgattcgctgcaggagatggtaggtctggcgaataacaatattgtcccggcggaagatttagaccgcagttatattgtctatccccgtatcaatcttgataaatgtgttggctgtggacgctgttatatttcctgttacgacggcggtcaccaggcgatggaatggagcgagaaaacccgcacaccgcattgtaataccgagaaatgtgtgggttgtctgctttgtggtcacgtctgcccggtgggttgtattgagctcggggaagtgaagtttaagaaaggcgagaaagaacacccggtaacgttgtaaaaccagagacgcatccggcatttggttcctgtcgccggatgcggcttgaacgccttatccggcctacaaaaccatacaaatcagtatgttgagcttattgtaggccggataaaacgcgccagcgttgcatccggcatttggctcctgttgccggatgcggcgtgaacgccttatccggcctacaaaaccacacagatcatgatgttatgtgcgtttatgaccgaatgcggaccacattcacatcatttcttacgcgcgtatttcagtgaatccagcgctacggcgaagataataatcgcccctttgatgatgtactgccagtatgggtttacgccgatatacgtcaggccatagttgatgacggtaaaaataattaccccggtcaccacgccaatcaccgtccccacaccgccgctgaacgatacaccgcctaccacgcacgccgcgatagcatccagctcatacataaagccgaggttgttggtggcagagccgatacgtccggcttctaacatcccgccaaaggcatagaacacgccagacaacgcgtagatcatcagcaggttcaggccgacgttgacaccagatacttttgccgcttccgggttaccgccaatggcaaaaatgttcttaccgaagcgggttttgttccacaacacccagacgaacgccaccgcaatcaacgcgtagaaggtgatgtaagagagacggaaactccccagcgcgacaaagccctgagcaaaggtagagaagccactgtcaaaaccagaaattggcgacgccccgacaaagtcgtaatagagcgagttgatgccatagacgatgatcatcgtgccgagcgtggtaatgaacggcgtcacgttgagataagcgataatcagaccgttgatcaaaccgatcaccgcaccaatggcacagacaatcagaataaccagcgcaatcggcatcgtcgccatttccgggaacactttgttggcgttatccatggactgcaataatgtcgcagccaccactgccgccagccctacctgacgaccagcagaaagatcggtcccctgggtgacaattaaccctgccacaccgagcgcgataataatacgcaccgatgactgggtgagaatattacttaagttcaacagacttaaaaatgttgggtcctggaaaataataatcgccagcaaaactaaaagaacgacgtaaataccgccctctttcaggtaagtaagaaaacttttcttatttaacgcactcatgggaagcccctaatcttaaaggtgcaaagacgcaagacgcagaatttcgttttgcgttgttgtttttgtatcgacaattccggaaacgagaccattgctcatgaccagaatacggtctgttatccctaacaactcaggcatttcagaggagataataataatccccttgcctttcttcgccagttcggcaattaactgataaatttcaaacttcgccccgacatcaataccgcgcgtcggttcatcgagcattaatatttctggttgcgttagtagccagcgaccaataatcaccttttgctgattaccaccggagagcgaaccaatttgcgtccgatgacccggcgtttttacccgcatcgaatcaatcacccactgggtatcgcttttcatccgcgagttatccagtaaaccaactttatttttgtagttgcgaatattggaaattaacgagttaaaaccaatatccagataggcataaattcccgttgagcggcgctcctcagttaccagtgcaaatccatggtttatggcttcgttggcattatggttattgatctgtttgccgtgcaacgttatggtgccagccgatttctcgcgaataccaaataacgtctcaacaatatcggtacgtttcgcccccaccagaccggcaataccgaatcaaacgagacatcgcgaatcgacggctggcgcagtgacgtcaggttacgtacctcgaggatgacttcgcccggtttgttttctttgtcagggaaacgctggttaagagaacgcccaaccatcatggcgatgatcttgtccatcgtcagtcctgccagcggttcggtggcgatccactgaccgtcgcgcaatacggtaacttcatcacataactggaagatttcttccattttatgcgagatataaacaataccgcagccgcgctcttttaatttacgaataatagtgaacagatgattgacctctttttcggttaacgaagaagtcggttcatccataatcacaattttcgcgttataggaaaacgctttggcgatttcgatcatctgcatttgcgaaacggataatgtgccgacgcgcgcacgcggatcgatatcaatatccagttcgtcaaaaatcgctttggtttcgcggtacattttgtcctgatcgacaaacatgcctttggtgggatatcgccccagccacatgttatccatcaccgaacgttgtaataccaggtttaactcctggtgtaccatcgaaataccattttccagggcttcttttgcagaatggaaatcgatctctttaccctggaataaaatggtgccggagtctttttgataaataccaaacaggcattttaataatgtcgattttcctgcaccgttttcccccattaatgcatggatagaatgtggccggacttttaaattaacgttatcaagtgccttaacaccaggaaaggacttgttgataccgctcatttccaacaagtattccccggaggacggagtcgttgagctgaccatataattttaccttgttggccatacaataagggcgcagtaatagactgcgcccaatcagtcttatttcttgctgaattcagccaggttgtctttatctacgccaacataaggtacgcggaccactttgttgtcgattttccagttggtgccatcagccgcacctttaccatcggccaggtttttcgccagatcaaaggtcgctttcgcctggttgttagcatcgttcagtacggtgcccgccagtgcaccggatttcaccagcgccagcgcttctggcagcgcatcgacgccaaacaccggaatgctggacttgttgtgtgctttcagcgcttcaaccgcgcccattgccatcgcatcgttgttggcgataaccacttcgattttgttggcgttcgggccagacagccaggcgtccatcttatctttcgcctgagcggtgtcccacattgcggtatctaactgtaactgttcagttttgatgcctttatcgttcaattctttaatcacgtaagtggtacgtgcttctgcatccggatggcccggttcacctttcagcagtacgaactgaatctgaccgtctttgttcagatcccaaccctgattcgccgcccagtgtttagcaatcaaatcgccttgaataatgccggactctttggagtcagtgccaacgtagtaggctttgtcgtagctatccagcgccttacgagacggttctttgttgaagaaaaccaccggcacgttttgcccacgcgctttctcaatcaccgtacccgcagctgccgggtcaaccaggttgattgccagtgccttcacccctttcgccagcaatacgtcgatctgatcgttctgcttggactggtcattctgagaatcattcatcagcagctgaacatctggcgcggctttcgcatcttgctcaatagccttgcgcactacagacataaagttatcgtcgtacttatagattgttacaccaatgcgagtatcagcagcgtgtgcagcggcaccgaataacatgctggccatcacagcagacagggttaacaccttcttattcatggtatctccggtttttcttatgcagggtagtgcttgagataaatgctcggcggggcagtagagttaatgaagtgttactgaacgccgaagctcactttttaaaattcgttcttccatgcccggtaacgctccagaaaacggctttaattgttgttatgacgctgttacctcggcaaaagtgattattcactgttacatacgggttacaacgttaaaacggtgcaatcatagctatcacattgttaagatactgtgaaatcactcacagattgaaagcggttacatcgcctgatttgttgagttagtgatcgccgccgcattctggcgtgttgcgacagaatggcgacgcactaacgtcggcataaaacagtggctggcacgaggatcaatattgcctgctgccccctgcaaggccagttcggtggctaatttcgccattgaagcaatgggataacgcacggtcgttaattgcgggtcggtgtaacgggcgatgggaatatcatcgaaaccgatgattgagagatgtaacggaatcgcaatgccattatcttttaatgctgtcagtgcgccagcggccatattgtcgttataagcaaatacagcggtaagttgtagattgcgccccagcagttcaaccatcgccgcctcaccgcccggcatgtccggcgtaccagcgccaatccagctttccggcggaataatatcctgctctttcaacgcactcatccagcctgctttacgcatggcgtcatcttcaatgccgtggctggaagaaagataaccaatacgttgatgaccgttattcagcaacatgcgcgtcgccattcgggcaccgctgagattatccaggcaaacgcaacgatgggcgtaccccggcacaacgcggttgattaacaccataccgggaatgttatccataaattgcgccagttcatcgtcactcaatgcttttgagtgaacaatcaacgcattacaacgctggcgaattaacacctcaatggcgtgacgctctttttccgcttcatgatagctattgccgattagcacgtatttctgatgctgctgagcgaccagatccaccgcttttaccagcgcgccgaaaaacgcatcagaaacgtccatcaccaccacgccaatggtgtcgctaacctgagttgccagcgcctgggcattggcgtttggccgataatccagctcactcacggctttcattactgcttcacgcgtgtcggcactgaccagcgtgctgttattgagcacccgggaaaccgttgccacagagacgccagcctgacgcgctacatcacgaatggtgatcatattcactacctgttatgagattgcagtaaatgactgcttgctggcggctattttgtcagcactgaatacaggacttcgtgaatcgagtcacagcaatggaaacggttacagccgttttgttaacgaatgtgatccagatcgttatcttgatgttttagatattgccggtccggcagcacgcaaagttaactgacgccagagccattccaccggcccctggcggaagtaacgcagccagataacagagaagaggatattcgccagccataccggaataacaaacgccagcagctccaggcggtcaaaatgcataaacaaaccgaggtggtaaaaaagcgtggtacaaatcagcgtttgcaatagatagttggtcagcgccatccgtccgacgcaggcgatcgcaagcaccagcttaaagcggctcaattgcggccagaagccataaaacagcgacgcatagccaatcgcctgaaacggcgcactcagttcccgcggcatttgaagtaagaaggcacaccagcgatacgcccagtccagctgccattgcagggcgatggcaggaaggttaatggtcaccccaatcgccaccagcacaaaaccagtacgacgatagtgacgtaagctgaactgccctttcagccagccgctgcgcatcagcgccgcaccaatgagcatcatccctgccagttgccagccatactgtgcgcccagtgccagtaaactgttgccaacaccatcggcacgattactgatcgcttcaacgccgccgtgaagcttccagtatttttcatacaaaatagccgatgcatccggcgtccaggcgcggctggtctggctgtcggaaatcagccccaataacagcaaaacgccaagccccaccagataaagcatgacgcctgtattaaacaggctttttaccgatggcgcatcgcgcaccagccgccagcagattaagcccaccagcccgtaagccagcaaaatatcgccgtcccagaacaataaaccgtgaataaagcccaacaagactaacagcgttaaccgcgactggatccagcgtctgccacggggcagcaacatttgcaggcccgcaccaaacagtagcgcaaaaagcgtgaggaatttcacctggccgatgagatcaagaaatgcccaagtccatgcatcccgcggcgtaatagcaccgtaccaggcgggattgagataagccgcctttggtagcccaaaggcgctgatgtttaatagcaggatccccagaatggcgacgccgcgaacaaaatcgagcgtgacgttgcgctccatggttcctgccttttaatcagttgtgatgacgcacagcgcgcagaaactcgtggcgcgtattctgactggatttgaacaatccaccaagagaggtcgttgtcgtggcactggttgcatcgcggatgccacgcgccttcacgcagtaatgcaccgcgtcgatcgagacagccacgttattggtgcccagcagcgtttgtagcgcaataagaatttgctgcgtcagacgttcctgcacctgcggacgctgggcaaagaactgcacaatgcggttaatttttgacagaccgatcaccgaatctttcgggatataggccaccgtcgctttgccatcgatggtaacaaaatggtgttcacaggtgctggtcagagtgatatcgcgcacggtgaccatttcatcgaccttcattttgttttcaatgagggtgattttcgggaaattggcgtaatccagaccggagaaaatttcatcgacatacattttagcgatgcgatgcggcgtttccatcaaactgtcatcagccaggtcgagattcagcagctgcatgatttcggtcatatgaccagcaataaggcttttgcgcgtttcgttatccatttcatgcacgggcgggcgcagcggtgtttccagtcctcgcgcaactaacgcttcatgaaccagggccgcttctttactgagtgatggcatttatgatttctcctgcaggtgtgacgcctccgccctgcgtgggggcaaagttattaagctgatttacagcctgattattgtgcgtgaggcggcgcacataatccagtattcacagcgataattattgtaattgccgctgcctttcatcagcagatgttaaaacatcgttatgcaaatacggaagtgaaagttactcacagcacattgaataaacggtatgatgaagaaattgcaaacaacacaacaaggagccacgcatggaaatgctcgaagagcaccgctgttttgaaggctggcagcaacgctggcgacacgactccagtaccttaaactgcccgatgacgttcagtatctttctccctccacctcgtgatcacactccgccaccagtgctgtactggctttccggattaacctgcaatgacgagaacttcaccaccaaggcgggtgcccagcgggtagcggcggaactggggattgtactggtgatgccagacaccagcccgcgcggcgaaaaggttgccaacgacgatggctacgatttaggccagggcgcaggcttttatcttaatgccacgcaaccgccgtgggcgacgcattaccggatgtatgattatctgcgcgatgaattaccggcgctggttcagtcgcaatttaatgtcagcgaccgctgcgccattagcggtcactcaatgggtggtcacggtgcgctgattatggcgctgaaaaatccgggtaaatacaccagcgtttcggcctttgcgccaattgtgaatccgtgcagcgtcccgtggggaatcaaagcgtttagcagctatttaggtgaggacaaaaatgcatggctggaatgggacagttgcgcactgatgtatgccagtaacgcgcaggatgcgatcccgacgcttatcgatcagggcgataatgatcagtttcttgccgaccagttgcaacctgcggtactggcagaagccgcgcgccagaaagcgtggccgatgacgctgcgtattcagccgggatatgatcacagttactacttcatcgcctcttttatagaggatcacctgcgcttccatgcgcagtatttactgaagtgaaagtccgcccggttcgccgggcatcttctcatcagaagcgataatccactgccataaagtaacgacgtccgtcttcgttatagctgtagtcgtcacgactgagatccttgtcgccaaggttcagcacgcctgcgcgcagtttgacgtctttagtcacctgccaggccgcgccggtattccagatggtataaccgcccggtgttttagccgtcgcgctgtcggcgcgtttctgcccggtatagtgcccagaaacatagaatgaccagtcttccagcgccagcggtttccagtccagcgtaccgttagcagtatggaacggcagatcggatagcggtttgttttcgccgttgctgacatcacgaccatcgttgtaggtgtagttgatcgacagtttccattcatcgttgaacggaattttcagttcggtttccacgccctgaatacgagctttgttaacgttgtagtagctaaataccggtatgcgccgtccgttagcgcccgtctcaaaaccaacaaagttttggtagcccggtgcagcgttgacgtcagacgtacggctgatgctgatacgatctttcacatcgttacggaaaacggtaacgctggattcaaccccttccagccagccttcttcacccatgtagtaaagccccagctcccaactttcgctggtttctggtttcagatccgggctacccacaatcttacatgcgccacggcaggaattgctcgtccagtcagggctaagttgcaacagagaaggtgctttaaatgccgtcgcccagccccctttcaccgttacggtgtcggtggcgttataaaccaggtaggcacgcggactccagtgttcaccgtaggtttcgtgatcgtccatacgcacgccggtcgtcagcgccagcggctcgaagatccgccattcatcttccacaaacagcgcgtactggctggcagacgttttggagctggttcccccggtcaggttcaccgcatcgctaagtttgtcgtgacgccattcaccgccaaccgtgagaaactgattaatcgccgtcagcggcaacgtgtatttgccgtcgaccgtattgctttcggaagttatcgggctgctgttgccagggtttttgttctcgactttctcaccgtagtatttcagttcgctggtgccgtaatcccaacgcccattatggctgacggagtagttctggcgttccaggcggtttttgtccagcgagtcggaatcacgatcctgacggtcgaaaccgtatccggcagtaaaatcgtgattttgattcggtgtccaggcaaattcgacattgccgtcgcggctggagaatccttcaatacgcggcgtttctccggtatcggtggtcgttgagttttgcgggtcatccttttcacgttttgccaggctgccgtaagctttcattcccagcacaccatcaattaatggtccactggtaaagaactgaccgttataggtgtcaccgcgatcgcgatgttcctgaatggtggtatcgacggtaacggtacccgaccatttctgaccgatttttttggtgatgatattcactacaccgccgagcgcatcggaaccgtacagcgacgacatcgggccacggaccacttcaatacgttcgatggaatcgaccgggatccagttcagatcgaaatcattgtggcggaagacggcattgcgggagttcacgcgtttaccgtcgacgagaatcagggtatagctgctgtccagaccacgaatactaacgcccttacggttatccccttcgttcgtcagttgtacgccaggcacttctttgaggacatccttcagattctgtaccggttttcgctgcaggtcttcctgggtaatgacgctgatactggcaggtgcatctttaagattttgttccacggaagatgcagtgacaaccatcgtttcgccatcatcatcgaccgctaacacaggccatgcacaagaaatagcggacaaacacagcccgacccgtacgaaagggttcaacctaaacattccatatctccatgaggtaactacgaaaataaaatgggttatcgctcacatcttcttcacgtccccttgcgtacggcagcatcgcggtggacttattttttatgcaggtgatcatcccagaaagccggaacagcctctgatttgtcagccttttttgattgcggcgtaacgataatgcaaacgataacaattatcaatccaaatgttaaattttatatccgcatgatttgtcagggaaatggaattgaaaaagccctctcggttgagagggcttagcaaggaagggaggaaacttatttcttatcgttctgcgggaacttcatttcgctgtagcgtacgaagtgagttcctttaatcagcttgtagccgaaccaaataatcaggaacagcgggataccaatatacgttgccgctacgccgccccagtcaatagtatctttcaggaacgcttcgtagttctggcccaaagtgataatcagacacagaatgaatgcgaagatcggccccagtgggaagaaacctgaacggtacggcagatcgttaatgtcgtgtccctgcaatacgtaaccgcgacggaagcgatagtggctaatggcaatccccagccaggcgataaaacccgtcatcccggaggtgttcagcagccacaggtataccgtctggttgccaaacatggaggtcaggaagcacagaccggcaatcaccgtcgtcgcatacagcgcattacgcggcacgccaccacgcgacagtttagcgaaaatgcgcggcgctttaccgtcacacgccagggtgtacagcatacgagtagacgcatacataccggagttacccgctgacagcaccgccgtcagaataactgcgttcatcaccgccgccgcagagagcagacccgcgtgctggaacaccagggtgaacggactaacgctgatgtctttaacatcgttacgcagcaggctcggatcggtgtacggaataatcaggctgataatcaggatcgcgaacacatagaacaacaggattcgccagaacacctgacgtaccgcgcgtggaatgtttttcgccggatcttcggactcgcctgcagcaataccgatcagctcggttccctggaaagagaagccgacaatcatagctacgccgatcatcgccgcaaaaccaccagcaaacggcgcttcgccgattgtccagttgctccagcccgcaggctgcgcgcctttgaagataccgataatcatcagcacgccaacgatgataaagacaataactgtcgtgactttgatcagtgagaaccagtattccgcttcaccaaagccacgaactgagatgtagttcagcaggaagataacgccgaggaacaacgcactccagatccagcccggtgtatccgggaaccaccagctcatgaccagctgagctgcaaccaggtcaacggcgatagtcaccgcccagttgtaccagtagttccagcccagcgcgaagccaaagccttcttcaacatagttctgaccgtaagtggcaaacgaaccggaaaccggcatatatgcagccagttcaccgagactggtcatcaggaagtaaaccatcaggccaatcagcatatacgagagcaatgccccgcccggacctgcctgagaaatcgttgcgccagaggcaacaaaaagacctgtaccgatggaaccgccaatggcaatcatcgtcaggtgacgcgcctttaattcacggcgtaagcccggcgcttctgtggttttagtttcggaaaccatacaaaaatgctatccatcttaaaaatgaggcgcgattgtagcagacgattggcaatccttccggcagaaatacacggttataagacaccttcatgatcgcccagggattataagtaaagcagccaatctcttttctggcgaatgcatgctgaaggcgctgcgtcacgaaatcgacacagcaccagcatgttcttgtacagcaacttaacgcggcacatttgcgggatcgcaatagtccagaaagcgccgtagcgcgttggaaaggtgtttttgccgatgatgtatacgccacaacgtacgcatcaggcgcggcagagggaccgcaacttcacttaatgtgcctgcctgcaattgatcttcaatcacacgtcgcgacaggcaactaattcccaacccatgacgcaccgcatgtttgattgcctcggagttacctaattccatcgccatctcaaacttcggtaaatgtgacagcaacagataatcgacaatctcccgcgtgccggaaccgcgttcacgcaggatccacggcgcagcggccagctgttctaaggtgaccggaccacgggccaacggcgaagtcggcgcggcgaaaaccaccagctcgtcttccagccacggttcagaaatgatttcagtgctgtggcacggtccttcaataaagccaatatcaacgcggaaatccagcaccgcttgcatcacgtcctggctattcccaacgctaagttcaatcggcaactgcggataatcatggcgataacgggcgataactgcaggcagaatgtagttaccgatggtactactggcatagatacgaatcgcgccgttgtcttcgcgaaacagttgttcgatttcaaccgcctgttcaagcaatgccaacgcacgcggatagagcagccgcccgtgttcattaacaaccagtcttttccccacgcgatcaaacagttgcacgccaagctgcccttccaggtcggtcaaggctgcgctcactgctgattgcgacaacgccagcatcaccgacgcctgggtggttgatccacttttcaatacttctgcaaaaacttccaactgccggagggtgatgtgcatagtcgcttaccacttataaagattaattataaatatataatcaattttatttttaaaccagttagtcgtaaccttatgcccggttaaaggagagggttatgacgaatatcaccttacagaaacaacatcgtacactgtggcattttattccggggttagccctgagtgcagttatcaccggggtcgccctgtggggtggttccattcccgcggttgcgggtgccgggtttagtgccctcaccctcgcaatcttgttggggatggttttaggcaacaccatctatccgcacatctggaaaagctgtgacggtggtgtgctgtttgccaagcaatatttattacgtctgggtatcattctttatggcttccgtctgacgttctcgcaaattgccgatgtcggtatcagtgggatcatcattgacgtgttgacgctgtccagtaccttcctgctggcttgcttcctggggcagaaagtgtttggtctggataagcacaccagctggttgatcggtgccggtagcagtatctgtggtgctgccgcggtactggcgactgagccggtagtgaaagcggaagccagtaaagtaaccgtggctgttgcaaccgttgttatcttcgggaccgtcgcgattttcctctacccggcgatatatccgctgatgtctcaatggtttagtccggaaactttcggtatctacattggttctactgtgcacgaagtggcgcaggtggtggcggcaggtcatgccatcagcccggatgcggaaaacgcagcagttatttccaaaatgctgcgcgtgatgatgctggctccgttcctcatcctgctggcggcgcgtgttaaacagctgtctggggcgaacagcggcgagaaaagcaaaatcactattccgtggtttgccatcttgttcatcgtagttgccatctttaactcgttccacctgttaccgcagagcgtggtgaacatgctggtaacgctggataccttcctgctggcaatggcgatggcggcgctgggtctgaccactcacgtcagcgcgctgaaaaaagctggggcgaaacctctgctgatggcactggtactgtttgcctggctgattgttggtggtggtgcgattaactatgtgattcaaagcgtcatcgcataaaccactacatcttgctcctgttaacccgctatcattaccgttttcctccagcgggtttaacaggagtcctcgcatgaaatacattggagcgcacgttagtgctgctggcggtctggcaaatgccgcaattcgcgccgccgaaatcgacgcaaccgcgtttgccttgttcaccaaaaaccaacgtcagtggcgtgccgcaccgctcacgacgcaaaccatcgatgaattcaaagccgcctgtgaaaaatatcactacacatcggcgcaaattcttccccacgacagttatctgattaacctcggacatccggtcactgaagctctggaaaaatcgcgcgatgcctttatagatgaaatgcagcgttgcgaacagctggggctttctttgctcaacttccaccctggcagccatctgatgcagatttcagaagaggattgccttgcgcgtattgccgaatccatcaacattgcgctggataaaactcaaggtgtgacagcggtgatagaaaacaccgccggtcagggcagtaacttagggtttaaattcgaacatctcgcggcgattatcgacggcgtggaagataaatcccgcgtcggcgtctgcattgatacctgccatgctttcgctgccgggtatgatttgcgtactccagccgaatgcgagaaaacattcgcggattttgcccgtactgtcggctttaagtatctgcgcgggatgcaccttaacgatgcgaaaagcacctttggcagccgcgttgaccgccatcatagcctcggtgaaggcaatatcggtcatgatgcgttccgctggatcatgcaggacgaccgtttcgacggcattccgctgatcctcgaaaccatcaacccggatatctgggcagaagagatcgcctggctgaaagcgcaacaaactgaaaaagcggtagcctgaagatgaataaccgggaaaaggagatccttgcaattttacggcgtaacccgctgattcagcagaacgaaattgcggacatgctgcaaatcagccgttcgcgcgttgcggcgcatattatggatttaatgcgcaaaggccggattaaaggcaaaggttacattctcaccgagcaggaatactgcgtagtggtggggacaatcaatatggatattcgcgggatggcggatatccgttacccgcaatcggcttctcatcccggtacaattcattgctcagcgggcggcgtgggacgcaacatcgcccacaatctggcgctgttaggccgtgacgtccatttgctttcagtgattggcgatgacttttatggcgaaatgctcctggaagaaacgcgccgtgccggcgtgaatgtctccggctgcgttcgtttgcatggtcaaagcacatcgacgtatctggcaattgccaatcgagacgatcaaaccgtgctggcgattaacgatacccatctgctggaacagttgacaccgcaactactgaacgggtcgcgcgatttacttcgtcatgcgggcgtggtactggctgattgcaacctgacagccgaggcgctggaatgggtctttaccctcgctgatgaaatcccggtgtttgtcgataccgtttcagaattcaaagcgggcaaaatcaaacactggctggcgcatattcacaccctgaaacccactttaccggagctggaaattttatggggacaggcgatcaccagcgatgctgaccgtaataccgcagtgaatgcattgcatcagcaaggtgttcagcaactgtttgtttatttgcccgatgagtcagtttattgcagcgaaaaggatggagaacaatttttgctgaccgcgccagcgcatacgacagtagacagttttggtgctgacgatggttttatggcgggcctggtatatagctttcttgaaggatacagtttccgcgacagcgcccgttttgcggtagcctgcgcggcaatttcgcgcgccagcggcagcttaaacaaccctaccctgtctgccgataacgcgctttcattagtgccaatggtgtaacaatgttgccggatgcgacgcttaacgcgtcttatccggcctacaaatcaggcaatttcagcaagtaaatgtaggcctgataagcttgcgcatcaggcaatgacactcaagctaaaccaataaagaacccggcaatggtcgcactcatcaagttggaaagcgtcgccgccgccagcgcccgtaaaccaagctgggcgatttccggcgcacggtgtggcgcaaccgcagaaaacgcccccaccaccaccccgatagaaccaaagttagcgaaaccgcacaacgcgaaggaaataatcgccacagttttagcatcgagagtgccagccgtttgcagatagggtgagaaattgagataagcgacaaattcatttattgccagtttctgtccaatcaaactcccggcaagattcgcatcactccagtccacacccatcacccacgccagtggagccagcaggtaacctaaaatggactccagcgaggcatgttcaaaaccaaaccagccaccaacgccgccgataataccgttaatcaacgcaattattgcaacaaatgccatcaccactgttgccacacctgcggcgattttcagcccggtcattgcccctgtcgcagcggcttcaataatgctttttggcggtgtttcggtgaaagagaggttattaaaggaaacctgcgaagattccgttgccgggcttaacaggcgggcaaacaagatcccgccagggatcgccattaatgatgccgccagcagatattccacaggcacgcccagtgcggcgtaaccaatcattgtcgaaccagcaatcgaggccatgccactacaaatcgctgtaaataattcattgcgattcagacgatcgataaagggtttgacgattgccggaatttcgttttgcccgaggaaaatggtggtgaccgcgacgaatgactcgatcttgctgatatttaatgctttctggaagataccgccgagaattcgaattaaaatccccatcacaccgatgtagtagagaatactcaccagcgcggtgacgaagataattgccggtaacaccctgaaaccaaagataaatcctgcaccatcaaataaggtatccattttcggtccgaccagagaaccgaagataaatgcgctacccgcgtcgctgtacgccatcactttatgcacgccaaaagcgactttttcagcgacccaacgccctggcggtaaccaaagcataatgccgccaatcacgacctgtaacactaacgccgcgccaacggtacgcaggctgatcttcttcttgtttactgacagtaaaaacgcaatcgtcagcaataccaccattcccagaacacttctcatgacatccatagtgattatctcttcatgtcatattgggcgacggctttctgcccatcagaaatagccaggcctgcatcttgcgataccggcccggcttgttatcaacacttaatgggttttgatgtagccgcgcacgcactcttcgactaatccccagaaccagtctgtatcaatagtgatgccgactttggtattggcgggcttgccaagaacgcccagctcgtcgcagacggtacgcccatagcaagggccactgttgacgtccacttcgacgtacatctcctgggttttaatgccatcagggttaatcagataaccgatgcaggtggcgtcgtgcaccgggccgccagcaaggccgtagttttcgaactgcgttttgagagtgaagttcatgatgtcgctgaacagctctccggcggggccgcctgccctttccatccgagcaatcacgtccggggtgcaaacggtctggttggtgagatcgaggcccatcatcactaatggaacgccggaggtgaacactacgcgtgcggcttccgggtcggcaaagatgttgaactcggcagatggcgtgaagttgcctgtaccgtaagcgccgcccattagcacaatttcacggattttgggcaggatcgcgggttgcatacgcattgccaccgcgatatttgaaagcggaccaaccggcaccagagtgatatcgccatcgcttgccatcagggtatcaatgatatatttcaccgcatgagtgctttctgcctggcgggtcagcggctcgaataccgggccatccagtccggtttcaccgtgaatattatcggcaacgatttgttgacgcataatgggctgcggcatccccgcataaaccggaacattaatctccagtttctggcaaacattcaggccattaattaatgttttatcaagcgtctgattacccgctacaatagtgatgcctaataaatctattgccggatgtttcgccgccatcattatagcaatagcatcatcatgacccggatcacaatccagaataatttttctcttttccattgtttatttcctctgtttccagttgcgttattttttctacagcaaagaaaattcgaccgggccgatgattgaatcttaacaacagcgtacgtatgctaaatatgagaaatctcatagcggataaacatcgtgaaagaaatccacaataatgatcttaagcagcaattgatgagtgaatccgcgtttaaggattgctttttaacggatgtttcagccgatacgcggctgtttcattttttagcgcgtgactacattgtgcaggaagggcaacagccgtcctggctgttttacctgacgcgaggccgcgccaggctttacgccacgctagctaatggtcgcgtgtcgctgatcgatttctttgccgccccctgttttattggcgagattgagttaatcgataaagaccatgaaccgcgtgcggtgcaggctattgaagagtgttggtgccttgcgctccctatgaaacattaccgtccgctgttattaaacgacacgctatttttacgaaaactctgcgtcaccttaagtcataaaaattatcgtaatattgtttctttaactcagaatcaatcatttccgttagtgaatcgcctggcagcatttatattactctcgcaggaaggtgatctttatcacgaaaagcatacgcaagcggcagagtatttaggcgtttcttatcgacatcttttatatgttctcgcgcagttcattcacgacggtttattaattaaaagcaagaaagggtatctcattaaaaacagaaagcagttgtcaggactggcgctggagatggacccggagaataaattctccgggatgatgcagtaaaaattattttcaatagcgcgattgccggatgcaacgcttaatacgttttatccggtctacaaatcgagcattacgccagaccaataaagaacccggcaatagtcgcactcatcaggttggaaagcgttgctgctgccagcgcccgtaaaccaagctgggcgatttccggcgcgcgttttggcgaaatagccgaaaatgcgccaacgacaacaccgatagaaccaaagttagcaaaaccacaaagcgcaaaggagataatcgcaatggttttcacttccagcgtgccgcccgtttgcaggtatggggagaaactcaggtaagcgacgaattcgttaatcgccagtttctgcccaatcaggctacccgcaagattggcatcactccagtccacacccatgatccacgccagcggtgccagcacatagccaaaaatactttccagagaggcattggcgaaaccaaaccagccgccaattccgccgataatgccgttgatcagcgcaataattgcgacaaacgccattaccaccgtcgccacaccagcggcgatttttagcccggtcatcgcaccgctcgccgccgcttcgataaagctttttggcggcgtttcgctgaacgacagattttcaaatgtgacctgcgaaggctcggttgccgggctaagaatacgtgcaaacaaaatcccgccagggatcgccatcagcgatgccgctaacaggtagtcaattggtacgcccattccggcataaccaatcatcatcgaaccagcaatggacgccatcccgctacaaattgcggtaaacaactcgttgcgattcatgcgatcgataaacggtttaacgatcgccgggatctcattttgcccgaggaaaatagtagtaaccgcaacaaaagattcgattttgctgatgttgagggctttctggaaaatgctgccaaggatgcgaatcagcagccccatcacgccaatgtagtacagcagactgatgagcgcagtaacgaaaataatcgccggaagtacgcgaaaggcgaagataaaacccgcaccgtcaaacaggacatccattttcggcccaaccagcgaaccaaaaatgaaggcgctaccggcatcactgtaagacatcactttatgaacgcctaatgccgcctgttctactgcccattttcccggtgggaagtagagcatgatgccaccaatagcgatttgcagcagcagtgcggctccaaccgtgcgcaaactgatgctctttttattcactgacaacagaaatgctattgccagtaacaccaccatccccacaacacttctcattatatccataatgattttcccttcatgccggtaaacccggcgtcagcgccaggttttggtatgcttgatgagtacgggcgacggctttctgcccgtcagaaattaacccgcgagacgctgatattctttggcaatttcgctcgccagaatggcgttgttgaacaccagctggatgttggatttcaggctgtcaccgccggtcagttcagcaacgcgcgccagcaggaatggcgtactttctttaccaatgactccctgagcttcagcttcagctaccgcctgatcgatcgccgcattgatagtgtgttccggcatagcaaactgttccgggatcgggttcgctaccacgaggccaccgttcagaccgctttgccatttcaccaccattgcacgggcaatttcgctggcgctgtcgagacgaatgctgacgtcaaacgggctggtgcggcagaaaaacgcaggcagcgctttagtctgatagccaattaacggcacaccgaaggtttctaaatactcagtggttaatcctaaatcgagaatagatttcgccccggcacaaacaacggtgacattagtatttgccagttcttgcaaatcggcagaaatatcgaaggtatgttccgccccgcgatgcacaccaccaattcccccggtggcaaatactttaattccggcaagcgccgcaataatcatcgttgaagccacagtggttgcgccattttttccggcggcaacaacaaaaggtaaatcgcgacgactaactttggtcacgttatgcccttcacgacccagtaattcaatttcttctttgcttaaccccactttcatcacgccgccaataatggcgatcgtggcaggtacagcgccctgtttacgaatagtttcttcaacttcaattgcggtctgggcattttgtgggaacggcatcccgtgagaaataatggtcgattccagcgccacaaccggttttttgttttttaaagcgtcctgcacttccggggaaatttgtaataattcaggggaaatttttaattcagacattctgcgttctccactaacgatataacgttggcaatcgataaatcggggttattggtgtattcacaggagagcgccattgacgaacatccctgtgcgaaacgaacagattcggcaaacggcattccgtctacccaacacgaagcaagtcccgccatcatggcatcgcccgctccggtaacattaataacattggttttgatcggcgcagaccagccactttcaccgctgatatcgctgtaataaacgccgtcgccgcccatgctcaataccagtcggttcaggccatgttgatggaaccaggcagcaacttttgccacatcttcacgccctgacagcgcaatcccactcagggtttccgcttcaaggcggtttggcttgagagtgtggatctgatttagacggtcgcgcactttgacacatttccatgccgaaaccggatcgacaaatacgggtacgttggcggcattatccagaatccatgccagtgcctcttcactgatattacagtccgcgacaatgacctttgccctctgaataaattcaccgtgctgtgcgagatattcagctgtaatagcgttgctaatattcatgtcatttatagcaaccagcatttcaccggtattatcgagtaatgataaataactcgacgtattttctcccggcacaatcaggcatttatcgacataaacgccagattgattggtttgcgttagcagcgattgaccataaaaatcactgcctacggcgctcagtagccaggctttgttacccagcaacgccaggttttgtgcaatattgcgccctactccaccaggcgtaaattttattttacctggatttgaatccgcataatttaatgattcatgtgaatatccggcgacatcaatattcgccgaacctataattacgacataatccttttcgcgcatagcacgtcctctggtaaaaaattaccaaccctgtcaatccacaagaatatagatactgcaaagacggtttaaacatgtgttcatatttaaacatgtgctcatagtatgcatgttttacgtaaagtaaattaccgccagagaggcaaaatgggcagatttgagcaggctcacaaaatgcgattaaatgcctgaattacaaaagcgaggaatttgtgacgggatgcacagaacagaacaataaaaaagggcagaaaataatctgcccttgaggaaataacctgagtgtttgatgaacgtttgaagtttctactgaaagataaaaccatttaaattcataaaattacattcacaaaccggtcattctctttgcgctcatcaaatgttacaggacaggaaatttctgccctgtaacacaccttttattacgctgctttcgctactgcgtccacttccggacgtttcaggaaggcataggccaaacccgccaccagcgtaccggcaataattgctaccaggtaacccaataccggcgtaatagcgccagggatcagcagaacaaacagaccaccgtgcggtgccatcagtttcgcaccaatcgccattgagattgcgccagtcagcgccccacccacgatacagcacggcagcacacgcatcggatcacgagcagcaaacggaattgcaccttccgaaatgaagcacagtcccaataccagagcggctttgccaccttcctgctgcgctttgtcgaatttgcgacgcgccaccattgttgccagacccattgccagcggtggcaccatacctgccgccataatcgccgccatcgggccataggtttgagtactcagcagacccacaccgaatgcgtacgctgctttgtttaccggaccgcccatgtcagtacacatcatgccaccgaggatcgcccccagcagaaccgcattcgcagtccccatggtctgcagccagtgagtcagcccttcgagaatgccagcaactggtttaccgatcaggtagatcatcgccagaccgaccaccagactggaaattagcggaatgatcaggatcggtttcagcgcctccatactctgtggcagtttcaattgcgtactgattaacttcgcaatgtaaccagccaggaagcccgcaataataccaccaatgaagccagaaccggtgctgaccgccagcataccgccaatcagacccggagtgaggcccggacgatcggcaatggaaaaggcaatataacctgccagtaccggcaccatcagcgcaaaggctgaaccaccaccaatctgcatcagcgccgcagccaacgtacccggctctttaaacgcttcgataccaaaagcaaaagaaagcgcgatacacagaccacctgcaacgaccatcggcagcatgtaagaaacgcccgtcagcaagtgacggtatgcgcctgcactctctttcttactttcagtggtcgccgtttgagctttgcccgccggttcatacggcgttgcttcagcaaccgctttatccagttcctgcgcggttttcttcagcgccagaccggtagaggtacgatacatcggtttaccagcaaatttcgccagatccacttcgatatctgccgccacaatcaccagatccgctgctgcgacttcttcgggagtgattgcattacccgcgccaacagaaccacgggtttcaactttcacccaccagccacgttttttcgcttcggtttcaatggcttcagccgccataaaggtgtgtgctacgccagtcgggcaagcagtcaccgcaactacgcgtttcggaccgctggcggcaactggtgctgtcgcagcgaccggcgcagtgtaaggtttcgcatggcctttggcttcactcaggaacagctcagggtgcgcaactgcccgggaaatatcgcccagccagacatttttaccgttcagcgcgctgtcgttcgggatggaatcaccgagaacaatcgccatttcagcgtcgttcggattgtcgatgatttccagttttgcttttcgcgccgccgcgcccagcagggtcttcgccatataggcgcgtgcctgaccgagattagcgtcaataatcagcagcgttttcattatgcctctcctgctgtcagttaaaaggttgtaagtcgacgcgcgccatcattgcggccaactgcggacgatcggtaatacccacattgctttgacttaccgccagggctgcaacagctgtcgccagacgcagtgtgtgttcactggattcacgcatcagcaagccataaatcaggccaccaaccatagaatcccctgcgccaacggtgcttacgacatcgactgacggtggtttggcgatccattcgccggaggcattaacccaaagcgcgccttcggcacccagtgaaataacaacatgcgcgatgccttgttcacgtagcgcatgtgcagcttcaatcacatctttcatttcaggcagtttacggcctgcccagatttccagctcgcggcggttaggtttcaccagccacggtgccgctttcaaacctgctactaacgcttcacggctactatcaaagataatgcaaggacactgactacgcaggcgagtcatccagtcggtgaacgcttccgggctgacgcctgacggtaagcttccgctgacacagaccatatcgaactgaccgagccagctcagagaatcagtcacaaagcgttcccagtcggcgggggtgacttcaaaacccgagaagttgaagtcggtcacttcgccgtctttttccgtcagcttaacgttaattcgggtgcgcccctgtacaacctggaaacggttggcaatgcccagctcgctgaacagttgctgaaaaccatcctgattgtctttacccaggaagccgccaacggtgacatcaattcccaggtcttttaatactttggccacgttgatgcctttacccgccgcatgcagaccggtggttttcaccaggttcacttcgccgcgttcaatttccgggcagaaaccaacaaggtcataagccggattaagggtgatagtagcaacacgtctgctcattatgcgccctccccaagaccagcagcgatagcgtcgccgattgctttcagcgcctgttcagcatctgcaccctgggcggtaaagcgtaggcgatgacctttcttaacgccaagtgccacaactttcatcagactacgtccgtttgccggtttgccggtaccatcaaggtttgtcacggtaatatcactgttaaattgtttaatggtattgaccagcatggtacctggacgagcatgcaggccgtgttcattgcgcaccacaaactccgcgcttaacacgtcgtcggtcggcgcatcatcgctggtcagcagcgccagcaacgttgccgcatccgctttcagcaagcggtcagctttattgtcgagcaataaatcagcgagacgcttaagaaccgcgatgggctgatcgtcattcatcgccacactcaccagcatggctgccgtttcgccgtccacatcaaaagcatttgccgcacggcttaccgcaatcgcgctacgcagattgccttcggcgctatcgctcagccagataccctgtccgagattcagcggttgttcattgatggctttggtgacgaaagtggcgtcaactgcccccgcctctttcagacgcgcagcgttcagcgcctgaagagtcagcagatcgctggcgacgatatccagtgtcagcatttcgttgtcgagcttcagctgctcactctgcttttcgcccatcagtaatgcgcgaagttcttctgctgttgttgctgacttcagttgttcagcaacggaatcatcgctcagtacgtgggtcagctggcgtagcaggcccagatgttcatccgagctggcagcaataccgattgccacgtacgctacctgaccgtcaccccaggtgacgccttccgggaactgaaatacctgaacgccggttttcagcacctgatcgcgggtgtcggtagtgccgtgtggaatagcaataccattgccgaggaacgttgaggtttgctgttcgcgcgccagcatgccattgacgtagccttctgctacattaccggcctgcaccagcgccgcagcgacctggcgaatcgcctctttttgtctccggccttttcgcccggatggatgtcctgtacggataactggaacatagttctcctctcttgctgaattgaaacgattcagcctctatgagaaaaaaagcgccaacctggcttagggttaaagacaagatcgcgctgaaacgtttcaagaaagcataatacttctgtttcagcacgcaaggaaagccgtaaagttatgagcaaaagtttgatgtgctgcacaattttttgccatttttcctaattgctgatgggaaaatccgttatcagcaatttcatttcagcagcgtcagcagccaatcagcaacagtgaaatggcattttgactattcgtggcgcttttgatttcgctgtctgtttattttctgacaagcagcgtaaactccgcgtcttcctcttccagtgatcgaccagcatgcataactcccccgcagtctccagcgcgaaatcgtttgacctgacctcgacggcgtttttaatcgttgcctttctcaccggtattgcgggcgctctgcaaaccccgacactcagtatttttcttaccgatgaagtacatgcccgtccggcgatggtgggattcttctttaccggcagcgctgtcattgggattctggtaagtcagtttctcgccgggcgctctgataagcgcggcgatcgcaaatcgctgattgtcttttgctgcctgttaggcgtgctggcctgcaccctttttgcctggaatcgcaactactttgttttgctattcgttggcgtctttcttagcagctttggctcgaccgctaacccgcaaatgtttgcccttgcccgtgaacatgccgacaaaaccggacgtgaggcggtgatgttcagctcttttttacgcgctcaggtttcactggcatgggtcattggcccaccgctggcttatgccttagcgatgggtttcagctttacggtaatgtatctgagcgcagcggtagcgtttattgtttgcggtgtgatggtgtggctgtttttaccgtcgatgcgaaaagagcttccgctggcgaccggcacgatcgaagcgccgcgccgtaaccgtcgcgatacgctgctgctgtttgtcatttgtacattgatgtggggctcgaacagcctgtacatcatcaacatgccgctatttattatcaacgaactgcatcttcccgagaaactggccggtgtgatgatggggaccgccgccgggctggaaatcccgacgatgttgattgccggatatttcgccaaacgtctgggtaagcgtttcttaatgcgcgttgctgccgtgggtggcgtctgtttttacgcaggaatgctgatggcgcattcacctgtcattctgttgggcttgcagctgctaaatgctatttttattggcattctgggcggcatcgggatgctctattttcaggatctgatgcccggtcaggcgggttcagccaccacgctctataccaacacttcgcgcgtgggctggatcatcgcaggatcagtggcgggcatcgtcgccgagatctggaattatcacgctgtgttctggtttgcgatggtgatgattatcgccactctgttttgcttactgcggattaaagatgtttaaggcgcggtcagcatttccagatcgataagccaggtcatggcctgctgacgcgagttaccgcacatttcagcgctggcttgtaagcctgcacagactttcggtcgcagtggcgaggtgaaaattttacagcgttgctgttcatcaagctgaatgcagggcgtattggcgggcttgccatctggcataccgggaatagggctggaaattgaaggggcagtgcaacacgccccgcaacccggacggcattccatacgttgttctcttaaggttaaccaccggattgatgagcgcgcacagtaccaccttttttgcaccagcaaaagtgcgaataccacttgcccgaaaggcccgtcgcgagtactttgtcgcgatatttttgacattttcgactacaggaatttttcgatgccaagagcgaacgaaattaaaaaaggtatggtactgaattacaacggcaaactgctgctggttaaggatattgatattcagtcgcccactgcccgcggtgccgctacgctgtacaaaatgcgtttttctgatgtccgtaccgggctgaaagtagaagagcgtttcaaaggtgatgatatcgttgacaccgtgacgctgacccgccgttacgttgacttctcctatgtcgatggcaacgaatatgtctttatggataaagaagactataccccgtataccttcaccaaagatcagattgaagaagagttgctgtttatgccagagggcggcatgccggacatgcaggtgctgacctgggacggtcaactgctggcgcttgagctgccgcagaccgttgatctggaaatcgttgaaaccgcaccaggcatcaaaggggcatctgccagcgcccgtaacaaaccggcgacattgagcactggtctggtgattcaggtaccagaatacttaagcccgggcgaaaaaattcgtatccatatcgaagaacgccgttatatggggcgtgctgactaacttcagccgcatgcagaaaagggatagctcaggctgtcccttttttaatttattataccaatcttctattttgcgcttcctgaacaccttacgccctcaattttcactcgttgattgatcgccctcacacttcatcgcattaacaatccagaccaatttcaattgctgtcatataactttacactgtcgttgttaattaatcgttactaagacgtgactcctatgaatacaatcgcctccgttacgctcccgcatcatgtacacgctccacgctatgatcgccagcagttgcaatcacgtatcgttcattttggctttggagcctttcaccgcgctcatcaggcgttactgaccgatcgtgtgctgaatgcccagggcggcgactgggggatctgtgaaatcagcttgttcagcggtgatcaactgatgagccagctccgcgcacagaaccatttatataccgtgctggagaaaggtgcggacggcaatcaggtgataattgtcggtgccgttcacgaatgccttaatgcaaaactggattccttagcggcaattattgagaaattttgcgagccacaggtggcaattgtttccctgacgattaccgaaaaaggctattgtattgacccggccaccggtgcactcgacaccagtaatccgcggattattcacgatctacaaacccctgaagaacctcactccgcaccgggtattctcgtcgaagcactgaaacgccgccgtgagcgcggccttacaccgtttaccgtgctctcctgcgacaatattcccgacaatggtcatgtggtgaaaaacgcggtgctgggaatggcagaaaaacgttcgccagaactcgccgggtggataaaagagcacgtcagttttccgggaaccatggtcgaccgcattgttccggctgcaaccgacgaatcactggtggaaatcagccagcatctgggggtgaatgatccctgcgcgattagctgcgaaccgtttatccagtgggtggtggaagataacttcgtcgctgggcgtcctgcctgggaagtcgcaggtgtacaaatggtgaatgatgtcctgccatgggaagagatgaaactgcggatgcttaatggcagccactcttttctcgcttatctgggttacctctcaggattcgcccatatcagtgattgcatgcaggatcgcgcatttcgccatgccgccagaacattaatgctggatgagcaagcgccgacactgcaaattaaagatgtcgatttaacacaatatgcggataagttaattgcacgttttgctaatccggcgctgaaacataagacctggcaaatcgcgatggatggcagccagaaattaccgcaacgcatgctggcaggtattcgcatacatcaggggcgcgaaacggactggtcgttgctggcattaggcgttgcaggctggatgcgttacgtcagcggcgttgatgatgccggaaatgccattgatgttcgcgatccgcttagcgataaaattcgcgaacttgttgcgggcagcagcagtgaacaacgcgtaaccgccctgctttccctgcgtgaagttttcggtgatgatctgccagataacccgcattttgtgcaggccatcgaacaagcctggcaacaaatcgtacaattcggcgcacatcaggcgctattaaacaccctcaaaatttaacgatttctgcggttaaagcggatgaagctcaccttcgtccgctctccccttctcttttctgccttttttagccaggattaacgctcagttaacttaccagagtattgcggagccgttgtgaccaggaccaacctcatcaccggttttctcggcagcgggaaaaccacgtcgattcttcatctgttagcccataaagatcccaacgaaaaatgggcggtactggttaatgaatttggggaagtcggaattgatggtgctttgctcgccgatagcggcgcattgctgaaagagatccccggcggctgcatgtgctgcgttaatggtttacccatgcaggtagggttgaataccttactgcgtcagggaaaaccagaccgcttgttgatagagccgaccgggctgggccatccgaaacagatcctcgatctgttaaccgcaccagtctatgaaccgtggatagatctgcgcgccaccttgtgcattctcgatccgcgcttgctgctggacgaaaaaagcgccagcaatgaaaacttccgtgaccagctggctgccgcagacatcattgtcgccaataaatccgaccgtacgacgcccgaaagtgagcaagcgctacagcgttggtggcagcaaaatggtggcgatcgacaattaattcacagtgagcatgggaaagttgacggtcatcttctggatttgccgcgtcgcaatttagccgagttgcccgccagcgccgcgcattctcatcagcatgtcgtgaaaaaagggttagcagcgttaagcctgccagagcatcaacgctggcgtcgcagtctgaacagcgggcaaggatatcaggcctgcggctggatattcgacgctgatacggtattcgacaccattggcattctggaatgggcgcgacttgcaccggtggaacgcgtcaaaggcgtgctgcgtattcccgaagggctggtgcgaatcaaccgtcagggcgatgacctgcacattgaaacgcaaaacgttgcgccaccggacagccgtattgagctgatttccagcagcgaagctgactggaatgccttgcagagcgcgctgttgaagcttcgtttagcgactaccgcgtaaggttgcctgcgtttttcagtaagataattagagaaaatatgattaaaaatttgccgcaaatagtgttgttgaatattgtcggcctcgcgctgtttctttcctggtatatccccgttaatcatggattctggttgccgattgatgcggatattttttatttctttaatcagaaactggtcgaaagtaaggcctttttgtggctggttgcattgaccaacaatcgcgccttcgacggttgttcactgctggcgatgggtatgttgatgctgagtttctggctgaaagaaaacgcccctggcagacgacgtatcgtgattattggtctggtcatgctattaactgcagtggtattaaaccagctgggtcaggcattaattcctgtaaaacgggccagcccaacattgacttttaccgatattaaccgcgtcagcgaactgctctctgttcccacgaaagatgcctcacgagatagctttcccggcgatcacggcatgatgctgcttattttttcggcattcatgtggcgttatttcggcaaagttgcaggccttatcgcccttattatttttgtggtttttgcatttcccagagtaatgattggcgcacactggtttactgacatcattgtcggttcgatgaccgtgatattgatcggtttgccctgggtgttgctgacgccattaagtgatcgattaatcaccttttttgacaaatcactaccaggaaaaaacaaacatttccaaaacaaataactcacagtaattaacatcatcagggttatttttatagtgaggataatcctgatgatgcgcaccgtgctttcatctatcgaacgcaaaaatcattctctaagtaaatgaatggattgcatgcgtttcactcaattgtactttaattgaccaaccccgcttattaactttctgtatcactttttcttataaaaaatcatgtaaaaccgctcgccaagaccgcaccaatcgggtaatctcgaactcgttttgcctcggcggtagattatcctcacagcatataattttgtgcgttagtccacagatttggccttaaggaattgtttcaacatgcccaggtaattagtctcgtgtcgcttggcatttttttataacgatatttgtcgttaaggacttcaagggaaaacaaacaacatggtcaaatctcaaccgattttgagatatatcttgcgcgggattcccgcgattgcagtagcggttctgctttctgcatgtagtgcaaataacaccgcaaagaatatgcatcctgagacacgtgcagtgggtagtgaaacatcatcactgcaagcttctcaggatgaatttgaaaacctggttcgtaatgtcgacgtaaaatcgcgaattatggatcagtatgctgactggaaaggcgtacgttatcgtctgggcggcagcactaaaaaaggtatcgattgttctggtttcgtacagcgtacattccgtgagcaatttggcttagaacttccgcgttcgacttacgaacagcaggaaatgggtaaatctgtttcccgcagtaatttgcgtacgggtgatttagttctgttccgtgccggttcaacgggacgccatgtcggtatttatatcggcaacaatcagtttgtccatgcttccaccagcagtggtgttattatttccagcatgaatgaaccgtactggaagaagcgttacaacgaagcacgccgggttctcagccgcagctaataaaccgtttggatgcaatcccttggctatcctgacgagttaactgaaagcactgcttaggcagtgcttttttgttttcattcatcagagaaaatgatgtttccgcgtcttgatccaggctatagtccggtcattgttatcttttaaatgttgtcgtaatttcaggaaattaacggaatcatgttcatacgcgctcccaattttggacgtaagctcctgcttacctgcattgttgcaggcgtaatgattgcgatactggtgagttgccttcagtttttagtggcctggcataagcacgaagtcaaatacgacacactgattaccgacgtacaaaagtatctcgatacctattttgccgacctgaaatccactactgaccggctccagccgctgaccttagatacctgccagcaagctaaccccgaactgaccgcccgcgcagcgtttagcatgaatgtccgaacgtttgtgctggtgaaagataaaaaaacattctgttcatctgcgaccggtgagatggacattccactcaatgaattgattccggcgctcgacattaataaaaacgtcgatatggcgatcttacccggcacgccgatggtgccgaacaaacccgcaatcgtcatctggtatcgcaaccctttgctgaaaaatagcggcgtctttgccgctctgaatctcaacctgacgccttcactcttttatagttcacggcaggaagattacgatggcgtcgccctcattattggcaatactgcgctatctaccttttcttcacgtttgatgaacgttaacgaattaaccgacatgccagtccgtgaaactaaaattgcgggcattcctctgaccgttcggctttatgcagatgactggacatggaacgatgtgtggtacgcatttttactgggcggcatgagtggaactgtcgttggcctgctctgctattacctgatgagcgtacgtatgcgccccggcagagaaatcatgaccgccatcaagcgcgaacaattttacgtggcgtatcaaccggtggtggatacacaagctttgcgagtaacgggcctggaagtactgctacgctggcggcatcctgtcgcgggagaaattcccccggatgccttcattaactttgccgaatcgcaaaagatgattgtgccgctgactcagcacctgtttgagttaattgcccgcgatgccgcagaattagaaaaagtgctgccggtaggcgtcaaatttggtattaacattgcgccggaccatctgcacagcgaaagctttaaagcagatatccagaaactgctcacttccctgcccgcacaccatttccagattgtgctggaaattaccgagcgcgatatgttgaaagagcaagaagccacacaactcttcgcctggctgcactcggtcggcgtagaaattgctattgatgacttcggcaccgggcacagcgcgcttatctatcttgagcgttttacgctcgattatctgaaaattgaccgtggatttatcaacgccatcggtacggaaacgatcacttcccccgtacttgacgcggtgctgacgctggcgaaacgcctcaatatgctgacggttgctgaaggggtcgaaacgccggaacaggcgcgatggctaagcgaacgcggcgttaatttcatgcaaggctactggattagccgcccgttaccgctggacgattttgttcgctggctaaagaaaccgtatacgccgcagtggtaaggtgtgcttacgtcccttattattcatagtgaaagcatgccggattgcggctaatgatgagtaaaaggaaatccgttgcagatgattgtgcgcatactgctgctgtttatcgctctgttcacctttggtgtgcaggcgcaggctatcaaggaaagctatgcctttgccgtgctgggcgaaccccggtacgcgtttaatttcaaccattttgattatgtgaaccccgccgcgccaaaaggtgggcagataacgttgtcagccctcggcaccttcgataatttcaaccgctatgcactgcgcggcaacccgggcgcacgcaccgagcagctgtacgacacgctatttacgacttccgatgacgaaccaggcagttattacccgctgattgctgaaagcgcacgctatgctgacgattattcctgggtggaggtcgctattaatccgcgcgcccgttttcatgatggttcgcccattactgcccgcgatgtagagtttacttttcaaaaatttatgaccgaaggcgtgccgcaatttcgtctggtctacaaaggcaccaccgtcaaagccattgcaccgttaaccgtgcgcattgagttagctaaacccggcaaagaagatatgctgagtctgttttcgctgccggtatttccagaaaagtactggaaggatcacaaacttagcgacccgctcgccacgcctccgcttgccagtggtccgtaccgcgttacgtcctggaaaatggggcaaaatattgtctattcccgtgtgaaagattactgggcagcaaacttaccggtaaaccgtggacgctggaatttcgacaccattcgctacgattattacctcgatgataatgtcgcctttgaagcgtttaaagcaggtgcctttgatttgcgtatggaaaacgacgccaaaaactgggccacgcgttataccggtaaaaatttcgataaaaaatacatcatcaaagatgagcaaaagaacgaatcagcccaggatacgcgttggctggcgtttaatatccaacgtccggtattcagcgatcgccgggtccgggaagctatcactctcgcctttgactttgaatggatgaacaaggcgttgttttacaatgcctggagtcgcacgaacagttattttcagaataccgaatacgcggccagaaattaccccgacgccgcggagctggtgcttctggcaccaatgaaaaaagatctaccgtcagaagtcttcacacaaatctaccagccgccggtatccaaaggcgatggctacgatcgtgacaacctgttaaaagccgacaaacttctcaacgaagcgggctgggtgctgaagggtcagcaacgcgttaatgccacaacgggtcagccactcagctttgaattattgcttcccgcaagcagcaatagtcagtgggtattgccgttccagcacagcctgcaacggctgggtatcaacatggacattcgcaaggtggataactcgcaaatcactaaccgcatgcgcagtcgcgactatgacatgatgccgcgcgtatggcgggcgatgccgtggcccagttccgatttacagatttcctggtcatcggaatatatcaattccacttataatgcccccggcgtgcaaagcccggttatcgactcgctgatcaaccaaattattgccgcgcagggaaataaagaaaaattactgccgttggggcgagcactggatcgcgtattaacgtggaattattacatgctgccaatgtggtacatggcggaagaccgtctcgcctggtgggataaattctcccagccggccgtgcgccccatctatagcctcggtatcgatacctggtggtatgacgtcaataaagcggccaaactgccgtccgccagcaaacagggagagtagatgggcgcttacctgattcgccgtctgttgctggtgatcccaacattatgggcgattatcaccatcaactttttcatcgtgcaaattgcgcctggcggtccggtcgaccaggccatcgccgccattgagtttggtaatgccggagtattacccggcgcaggcggtgaaggtgttcgtgccagccatgcgcaaacgggtgtcggcaatatcagcgacagtaattaccgtggcggacgcggattagatccagaagtgatcgctgagatcactcatcgctacggttttgataagccgatccacgaacgttacttcaaaatgctctgggactacatccgctttgattttggcgatagcctgtttcgcagcgcctcggtgctgacgctgattaaagacagtctgccggtttccatcaccctcggattgtggagcacgctgattatctatctggtgtcgattccgttaggcattcgcaaagctgtttataatgggagccgctttgacgtctggagtagcgcatttatcatcatcggctacgccattccggcctttttgtttgccatcctgctgattgtcttcttcgcgggcggcagctatttcgacctgttccctctacgcggcctggtttccgctaactttgattcgctgccgtggtatcagaaaatcaccgattatctgtggcatatcacgctgccggtgctggcgacagtgattggtggctttgcggcgctgaccatgctgacaaaaaactcattccttgatgaagtgcgcaagcaatacgtggtgaccgcgcgtgcgaaaggggtaagtgaaaaaaatattctctggaaacatgtgttccgcaacgccatgctgctggtgattgccggttttccggcgacgtttatcagcatgttttttaccggctcgctgctgattgaggtgatgttttcactcaatggtctgggcttactgggctacgaagcgaccgtctcgcgcgattatcctgtaatgtttggtaccttgtatattttcaccctgattggcctgctgctgaatattgtcagtgatatcagctatacgctggttgatccgcgtattgattttgagggacgttaatgtcgcgactcagccccgtcaatcaggcccgttgggcgcgttttcgtcataaccgtcgcggctactggtcgttatggattttcctcgtcttgtttggtttgagtttgtgttctgaacttatcgccaacgataaaccgttgctggtgcgttatgacggcagttggtatttcccgttattgaaaaactacagcgaaagcgattttggcggcccgctggcaagtcaggctgattatcaggacccgtggctgaaacaacggctggaaaataacggctgggtactgtgggcaccgattcgctttggtgctaccagtatcaactttgctaccaataagcccttcccttctccaccctcccggcaaaactggctgggaacggatgccaacggcggcgatgtgctggcacgcattctctatggcacgcggatctcggttctgtttggcctgatgctgactctctgttccagcgtgatgggcgtgctggcgggggcgctacaaggctattacggcggtaaagtcgatctctggggacaacgctttattgaagtatggtcggggatgccgacgctgtttttgattattttactttccagcgtcgtacagcctaacttctggtggctgctggcaattactgtcttgtttggctggatgagtctggtcggcgtggtgcgggcggagtttttacgtactcgtaatttcgactacattcgtgcggcacaggcgcttggcgtcagcgatcgcagtatcatcctgcgtcatatgttgcctaatgccatggtcgcgaccctcacctttttaccgtttattttatgtagttcgataaccaccctgacctcgctcgatttcctcggcttcggtctaccgctcggttcaccgtcactcggtgaactgctgttacaagggaaaaataaccttcaggccccgtggcttgggatcaccgccttcttgtcggtggcgatattattgtctttgctgatctttattggtgaagccgtccgcgacgcatttgatcctaataaggcggtgtagcatgacgcaaactctgttagcgattgaaaatttgtcggtgggttttcgccatcagcaaaccgtacgtacagtagtcaatgatgtttcactacagattgaggctggcgaaacgctggcgctggtgggtgagtcaggttcaggcaaaagcgttaccgcgctgtcaattttacgcctgctcccttccccgccggttgaatatctctccggcgatattcgttttcatggcgaatcgctgcttcacgccagcgatcaaacgttgcgcggtgtacgcggtaataagatcgccatgatttttcaggaaccgatggtgtcgttaaatccattgcataccctggaaaaacagctttatgaagtgctttcactccaccgcgggatgcgtcgggaagcggctcgtggcgaaattcttaactgccttgatcgcgttggtatccgccaggcggcaaaacggctgacagattatccgcatcagctctccggcggcgaacggcagcgggtgatgattgcgatggcgctgttaacgcgaccggaattattaattgccgatgaaccgaccaccgcactggacgtctctgtccaggcgcagattttacagctgttgcgcgaactgcaaggcgagctgaatatgggcatgctgtttattactcataacctcagcattgtcagaaaactggcccaccgcgtggcggtaatgcaaaacggtcgctgtgtcgagcaaaattacgccgctacgctatttgcatcacccactcatccttacacacaaaagctactcaacagtgaaccgtcaggcgatccagtgccgttgccagaacctgcctcaacgttgctggatgttgaacagcttcaggttgccttccccattcgcaaagggattttgaagcgcattgtggatcataatgtggtggtgaaaaacatcagttttacgctacgagcgggtgaaacactgggtttagtgggcgagtccggttccgggaaaagtacgacgggactggcgctgctgcgactgattaattctcagggcagcatcatctttgacggtcagccactgcaaaatttaaatcgccgccagctgttacctattcgtcatcgcattcaggtggtatttcaggatccaaactcctcgctcaacccacgactcaacgttttgcagattattgaggaaggcttacgggttcaccagccgacgctttctgccgcacaacgcgaacaacaagtgatagccgtgatgcatgaagtgggattagatcctgaaacacgccaccgttatccggcggagttctctggtggtcagcgacaacgtattgcgattgccagggcattaattcttaagccctcgctgatcatacttgatgaaccgacatcatcactcgacaaaacggtacaggcgcaaatattgacgctattgaaatcattgcaacaaaagcatcaactggcctatttgtttatcagccacgatttgcacgttgtccgcgcgttatgtcatcaggttatcatactgcgacaaggggaagtagtggaacaaggaccgtgcgcgcgcgtgtttgccacaccgcagcaggagtatacgcgtcagctactggcgttgagctgacgcttaaaaaggattgtagtttgaaaagggttcggcaattgccacaccaaaatttttcaatcggcatgttgcagcaaactcgtcctggcgatttacaaacaggcacggctcaccttcacactccagcaccgaacatggaacttcgatgtcgcttaacgcctggcttagtttatacatcaccgaccatgcattatcaccatccgggctaagcaatttaagcgccaccaggctgttgtcaccgcacggtccattttgcggaatcggttcaaccttcgaacctgcgaaaccagcagaccagcgatagttctgcggcagtcgatggacgattgagagttgtaatgaagtcacttattttccccggaagcacattcacttcacaatttgtttacatcaattttaacacatcatcaacaatccgtctttatacagatcgtaaagattgatgcctcgcctgcgtggcctctatggctctgatttaagtaatatctgcgggcgtggtcacgtttgcggggctatatgtacccgtttctgcgatctaactcaacctttttaactacaatgatgtgactttttacataaattgattttacataaaataaacatatatcgggggaatgatagatttgtggttgacatgcatcaacaaaggaagccttttagcttcctcgttgtgcaatagatcaccgttttttcggccgactggcgtacagacagaagagaatggagctggttgcgcagaatgcaattgaccaaatcatcggccatgcagagttaaaggtcgcaagagaaagcaatgcgccaacaattgcccctatgccaaaacggaaggttcctgccagcgaagatgccgttcccgccatatggggaaactcatcaagaatgaccgccatcgcattggatgacaccatcgacacgcagcccacaaacgccgcaacgccaaccaccagcgaccaaaatcccagccccagcagcgcactgatgaccatccacgctgccataataaattgtatccacaaccccgagcggaacatatttaacgcgccaatgcggcggacgaagcggctgttaaagatggtcatcacgaacagaaaaacaatgtttagcgcaaagtaataaccaaagttttccggcgcgacgtggttaatttcaatataaacaaacggtccggcgcttaagaatgagaacatcccggcaaagctgaaaccactggcaagcatgtagctcaggacacgtttatggcggaacagcgccgcaaagttaccaatagtggtacgaatgtgaaatggctgacgacgctccggtggtaaggtttctttaatcaggaagaaaatcattgccgaagccagaatcgccgctaatgccaggatccagaagatgtaatgccagctcagccacaccagcacccagccgccaactatcggtgccatcagcggtgcaatggttgtcaccagcatgacaaacgacatcatccgcgagaactcttctttcgggtaaatatcgcgcatcagggcgttaatgaccacgctggccgcagccgcagccagcccgtggaagaaacgcatcacaatcagctgatcgatggtgtttgccaacgcacacgccaccgcggcggcggcaaacaccagcgtaccgccgagcaccaccggcttacgcccgaagctgtctgccatcggcccgtagattaactgccccaacgcaaagcccagaatataagtactgagggtcatctgcgtactgcccgccggtacgccaaactgcgctgaaattaccggtagcgcgggcagatacatatcaatcgacagcggcatcaacatggccagcaggccaaggataaaaacaatagcaaacgacgaatgctgtcgggtggtcacaacgggctcctgaaagtcattgaaaagttagacgacgctggcaatttcttcttcagttaacggacgatattcaccgggggctaaatcagcatccagcgtaataccgccaatacgttcacgatgcagctcaaccacgtggttacccacggcggcgaacatgcgtttcacctgatgataacgcccttcgctgatggtcagacgaacctgcgttggggtaatcacttccagcaccgcaggcttagtgagatctttttcgttatgcagctgcacgcctttagcaaattgctctgccgtatcgtcagctacaggtgattccagtgtcaccagataggtcttctcgcaatgatggcgcggagaagtaatgcggtgcgaccactgaccatcatcagtcatcagcaccagaccggtggtatcaatatccaaccgccccgccgcatgcagtttccacgctaccggttcatcaagaaaatagagcaccgttgggtgatcagggtcgtccgtggagcaaacatagccctgaggcttattgagcatgaagtaacgtggaccgtgttgctgcgccagcgggttgccatcgtaagcgacatcatgttcaggaagcagtttgaacgctgcattacggacgatttcgccatcgacggtgacacgattgccgcggatttcacgcccggcaatagcacggctaacgccgagttgctgtgcgataaatttatcaagtcgcatgtgtgtgattttgcctgtaaaaacggaggtcgggcattgacccgaaaatctgaactgttgtctgcccagtatagcggtctaataacatccctcaagggaaaaagatccatggcatactattagcagaataatctacctacgcgagaccatgatttttacacttcgcccatatcagcaagaagccgtggatgccacgctcaaccattttcgtcgtcataaaacccctgccgttatcgtgctgcccaccggcgcaggtaaaagcctggtgatagcggaactggcacggctggctcgtggtcgcgtgctggtgctggcacacgttaaagaactggtggcgcaaaaccatgcaaagtatcaggcgctggggctggaagccgatatttttgccgccgggctaaagcgcaaagagagccacggtaaagtggtatttggcagcgtgcagtctgtcgcccgtaatcttgatgcctttcagggtgaattttcgctgttgattgtcgatgaatgtcaccgtattggtgacgatgaagagagccagtatcagcaaatcctcactcacctgacaaaagtgaatccccacttacgcctgctggggctgactgccacgccttttcgattgggcaaaggctggatctaccagtttcattatcacggcatggtacgcggcgatgagaaagcccttttccgtgactgcatttatgagctgccgctgcgttatatgattaaacacggctatctgacgccgccagaacgactggatatgccagtagtgcaatacgatttcagccgcttgcaggcacagagtaacgggctgttcagcgaagccgatctcaaccgtgagctgaaaaaacaacaacgtattaccccgcacatcatcagccagattatggagtttgctgcaacgcgcaaaggggtgatgatttttgccgcgacggttgaacacgcaaaagagattgtgggattactgcctgccgaagatgcagcactgattactggcgacacccccggcgctgagcgcgatgtgttaattgaaaattttaaagcccagcgttttcgctatctggtcaacgtcgcggtactgaccaccggatttgacgccccgcacgtcgatcttatcgccattctgcgccctaccgaatcagtgagtctttaccaacaaattgtcgggcgcggtctgcgtctcgctccgggcaagactgattgcttaattcttgattatgcgggtaatcctcacgatctctacgcgccggaagttggtacaccaaaaggcaaaagtgacaacgttccggtacaggttttctgccctgcctgcggttttgccaacaccttttgggggaaaacgaccgccgacgggacattgattgaacactttggtcgtcgctgtcagggatggtttgaagatgacgacggtcatcgcgaacaatgtgacttccgtttccgttttaaaaattgcccgcaatgtaacgcggaaaacgatattgccgcccgccgctgccgcgaatgtgacaccgtactggttgatccggacgatatgttaaaagcggcgctacgactgaaagacgcgctggtattacgctgtagcggcatgtctttgcaacatgggcacgacgagaaaggcgaatggttgaaaatcacctattacgatgaagacggcgcggatgtgagtgagcgtttccgtctgcaaacacctgcccagcgtaccgccttcgagcagctttttatccgcccgcatacgcgcacaccgggcatcccgctgcgctggatcaccgccgccgatatcctcgcccagcaagccttattgcgacacccggattttgtcgtcgcccgcatgaaaggccagtactggcaggtgcgtgaaaaagtgttcgattacgaaggtcgttttcgtctggcgcacgaattacgcggttaatggtagttttgattgatgtataaggcgattgagtatagaatctcgcccgcttttgcatacgcaaagcagatcacttacctgttgctgggtcgcctgtagcaggattaatttaagagagaaagaaatgtttactatcaacgcagaagtacgtaaagagcagggtaagggtgcgagccgccgcctgcgtgccgctaacaagttcccggcaatcatctacggtggcaaagaagcgccgctggctatcgagctggatcacgacaaagtcatgaacatgcaagctaaagctgaattctacagcgaagttctgaccatcgttgttgacggtaaagaaatcaaagttaaagctcaggacgtacagcgtcacccgtacaaaccgaagctgcagcacatcgacttcgttcgcgcttaattgctgaataagttgtaaaaaaccccgctccggcggggttttttgtatctgcagattatgcctgattacggtattgctattttttgcaggccagataaggcgttcacgccgcatctggcattcagaacacaaaaccgattaattgccgccagacgtccggcgctgcaattggtcgcgcaaattcggcggcgtgcctttaatggtcaaggtatcggttgctggatcccagaagatgcgttcacctaacagcatcgcatcaaagttaatagtcaagccaccgccgctaccggcaaacttcgtcaactgacgcagtgtgctacggtctgccgggaagctctcttccagttcgtagcctttttcagccgcaaactccgtgaagctcacttcgcttacgcctgccagctctttcgacagcgatttcagttcgatctcttcgcctgcctgcagctgctcattacagtagctataaacctgctggcgcacgttctgtcgctctgctttatccagttgtgcttcggcagtgaaatcatcaaccgcttgcaacagcccacggttttgcgctttcgcgtttaacccttcgctggccccgaggaaatccataaagaaatccgccactttgcgccctactcgccctttcaggaaagtgagatagcgggtggactctggattggtttcccattcggttaaatcgatacgcgcaacaatatccgcatgattgatatcaagataatgggttgggttgatgtcgagattttcgttaacgcgcatactgctcaggttgctcagaactgccaccagcaaatactccaccgccagatagcgatagtggcaaaacagcacgaatccaccgtcagcaaaaggatatttcgctaattcgtcacgcaggcggccggttgccgcgcggctaaatgccaggaagtcctcttcgccctgacgctgtaagcgcagcgtctgcgccagttcactctcttcgctaaacaagccgtaagctttatttttggcgctatagacccgatgcagttctgccaccatctcaacgacggtttctgtcggttccagcaatgaatcgcgcaacaccagctcaaggttctgctcatcacgcttgataagctggtgcagagcaatctggttgatatccagactcatgataaactctcctttaagaccgggcggtattcaaccaccgccggttaagcgacgcaataaaagatggcggtcattttacagaaggcagcgtaacgagaatgatttaacgcataaaaaagcagaaaaaaaaccgttgctacggtaatatgttgccctttcatcaactaactgatttcgatttatgccacaaatttcccgctacagtgatgaacaggttgaacaattgctcgcagagctgctcaacgtactggaaaaacataaggctccgaccgacctttccctgatggtgttaggcaacatggtcactaaccttatcaacaccagcattgccccggcccaacgccaggcaattgccaactcttttgcccgcgccttacagtcctctatcaacgaagacaaagcgcactaagggaaacagataacaggttatggtaactcatcgtcagcgctaccgtgaaaaagtctcccagatggtcagttgggggcactggtttgcactgttcaatattctgctttcgctcgtcattggcagccgttacctgtttatcgccgactggccgacaacgcttgctggtcgcatttattcctacgtaagcattatcggccatttcagcttcctggtgttcgccacctacttgctgatcctcttcccgctgacctttatcgtcggctcccagaggctgatgaggtttttgtccgtcattctggcaacggcgggaatgacgctattactgatcgatagcgaagtctttactcgtttccatctccatcttaatcccatcgtctggcaactggttatcaacccagacgaaaatgagatggcgcgcgactggcagctgatgttcatcagcgtgccggttattttattgcttgaactggtgtttgcgacgtggagctggcaaaagctgcgcagcctgacgcgtcgtcgacgcttcgcgcgcccgctggccgcattcttatttatcgcctttatcgcctcgcatgtggtgtatatctgggccgatgccaacttctatcgcccgatcaccatgcagcgcgctaacctgccgctttcgtacccgatgacggcgcgacgttttcttgagaagcatggtctgcttgatgcgcaggagtatcaacgccgtcttattgagcaaggtaatccagacgccgtttccgttcagtatccgttaagcgaactgcgctatcgcgatatgggcaccgggcagaatgtgctgttgattactgtcgatggcctgaactactcacgcttcgagaagcagatgcctgcgctggcaggttttgctgagcaaaatatttcgttcacgcgccatatgagctccggcaacactacagacaacggcatctttggcctgttctatggcatctcgccgagctatatggacggcattctgtcgacccgtacgcctgcggcattaattactgcgcttaatcagcaaggctatcagctggggttattctcatcagatggctttaccagcccgctgtatcgccaggcattgttgtcagatttctcgatgccgagcgtacgcacccaatccgacgagcagaccgccacgcagtggatcaactggctgggacgctacgcacaagaagataaccgctggttctcgtgggtttctttcaatggtactaacattgacgacagcaatcagcaggcatttgcacggaaatatagccgggcggcaggcaatgtcgatgaccagatcaaccgcgtgctcaatgcactgcgtgattctggcaaactggacaatacggtggtgattatcactgccggtcggggtattccactgagcgaagaggaagaaacctttgactggtcccacggtcatctgcaggtgccattagtgattcactggccaggcacgccggcgcagcgtattaatgctctgactgatcataccgatctgatgacgacgctgatgcaacgcctgctacatgtcagcacacctgccagcgaatattcgcaaggtcaggatttgttcaaccctcaacgccgtcattactgggttaccgcagcggataacgatacgctggcaattaccaccccgaaaaagacgctggtactgaacaataacggtaaataccgcacttacaacttacgtggtgaaagagtgaaagatgaaaaaccacagttaagtttgttattgcaagtgctgacagacgagaagcgttttatcgctaactgattaattataaatcagttagcgaaatatcttacttgcaatcggtgtggaaaacggtagtattagcagccacgagtcggcacgtagcgcagcctggtagcgcaccgtcatggggtgtcgggggtcggaggttcaaatcctctcgtgccgaccaaaaatcccaagaaaaaaccaacccttacggttggtttttttatatctgcaattaattcgataaacagaccgtgacacatcacagcctgtttattttctgttatcagaacgtccagaccacacccgcctgagtattccacggcgattctacccctgcgccattgccatagctgactgacaaatgaccgcttaacgtcggggtaaacgatgaccttataccagcctgataaacgccactggttccagccacatcattattaaatttgccatcgtcattaactttcacctggttagaatcggcgtattcctgacgcacggccgctttcagccagggttccagcgtcgtaccgttttgcaggtccatgtgatagcttaccgccgttcccgcttcagcgcgtaatatccgggtatttcccacatccgcgcgcatgccgtttgataacgtgtagtcctgaccatctgtggtaaagccggtaaaggccagatagggtctaacactccacaatccgtcaacccaacggaacccgctctcaacatgagcacccgcgccgttactattgtaatcgccaaacgctgttgccccattactcatcttgccatggatggtgttggcaaaacggtcaactttcaccaccccatcaacataggcaccgttctgatgctcccaaccggcataagcccccagggtatagctatcgatattacctttgccgccgcgatcaaaaccaatatcagaatgagagtaaccaaagatcaagccgcgaattgtactgctttcttcacgggagaaacggctatcgataccgagcgtcaggcccgtcaatgtttgctcaaaaccagctcccgcatcagtggtcacgttgttgcgggtgttaattgccgaactccacatcgccgtatcgtaactaacgccttttacgctaccaagacgctcacgcacggtgtccagttctgcatcaaataccagcggttgtgcggccgccatattcagcacatcagtggttgaaggggtaatttgcgcgcgattctctgccagactccagctatggttgccattatccagcaaggtatattcatacgtaccgatatcaacaacgcctccggcattgcccaacgtaaatgcagcatcaccgccgcccgttgttaccagtgtaaggctatctcctgctgccgggctggcaccggtgtccgtcacgaatattttgaaatcacctgttgcctgaccggtgacgttgagctgatcgctctgatgattagccatatcggtacgcatataaaaattgccgtttcccgacagggtattggtggtcaacgtaatgaaattttccgcacttgccgtcactgatgaacgagtcactggctcatccatcataatcacatttgcgtcagacatcgcaaggttggctaagttgaggagggtgttttggttcgtcgtagtgatatcggcaatgatggtccatacgctattttcgagcgaaacgtccgctttgctggtatccacggcaccatgcgttctaaaagaagcgccctcagaaaccactaccttacccaccaacattgcgggtgcataatttatttgcggcttcatgacctcaagaatgccatcattccctctgactgaaacgttaaccattgtgccagcccagacgttagcgcggccattgttgataaccatattttcagagatggcttttgaggaatacgtgatacttccattctgatatgatcgaccgagatcatataccgcatttgcctgcactttcgtaccagtatcctttcccagcgattgcatagtggcatgcttatcaaggatagtatcaatggcctgcgtgtcctccataacaatgagcccggaaccatcatccagttcataattttttgacacaccatcttttatactaaattggcctttactgtttggaccactcacttccagcgcattcgttgagacaattaattttccgcctgcttttttatcaacgccagttacagtcccgccatccataacctccagtaagccgccactatctacagtggtattataagcgaagtcattttcttcaactcgcaaacttccgccgttttccaacaacatattattagcaataccattcttgatatcgaactgaccgagacggtttgttccgaatacctccatggcccgcgtggttgttttaatagcaccgcctgctttctgatctaccgcaaatgcaaatcccccctctttaacctccagtagtcctcccttttcgatagcgacaaagacggcccccccatctttttcaacgattaagcgcccgcctttaatcgtggtatcattcgctgcgccataaacctgtagcacaccattattgagcgtagtctggtttgccgcgccacccatttgaacaatttgataaccgtcatttaatactgagtattctgcggcgccattcatttcaatgtactgataccctccgttaatttcagtattattacttacaccaaattcttttatatgctgttctccgccaggattgattttcgtattattggcggtcccataaaccagctggatatctttttccaggacaacaccatcaactgtctcaccatactcaacagttgatgccaatgctatgggtgaatataaggaaggtgcgaataagcggggaaattcttctcggctgactcagtcatttcatttcttcatgtttgagccgattttttctcccgtaaatgccttgaatcagcctatttagaccgtttcttcgccatttaaggcgttatccccagtttttagtgagatctctcccactgacgtatcatttggtccgcccgaaacaggttggccagcgtgaataacatcgccagttggttatcgtttttcagcaaccccttgtatctggctttcacgaagccgaactgtcgcttgatgatgcgaaatgggtgctccaccctggcccggatgctggctttcatgtattcgatgttgatggccgttttgttcttgcgtggatgctgtttcaaggttcttaccttgccggggcgctcggcgatcagccagtccacatccacctcggccagctcctcgcgctgtggcgccccttggtagccggcatcggctgagacaaattgctcctctccatgcagcagattacccagctgattgaggtcatgctcgttggccgcggtggtgaccaggctgtgggtcaggccactcttggcatcgacaccaatgtgggccttcatgccaaagtgccactgattgcctttcttggtctgatgcatctccggatcgcgttgctgctctttgttcttggtcgagctgggtgcctcaatgatggtggcatcgaccaaggtgccttgagtcatcatgacgcctgcttcggccagccagcgattgatggtcttgaacaattggcgggccagttgatgctgctccagcaggtggcggaaattcatgatggtggtgcggtccggcaaggcgctatccagggataaccgggcaaacagacgcatggaggcgatttcgtacagagcatcttccatcgcgccatcgctcaggttgtaccaatgctgcatgcagtgaatgcgtagcatggtttccagcggataaggtcgccggccattaccagccttggggtaaaacggctcgatgacttccaccatgttttgccatggcagaatctgctccatgcgggacaagaaaatctcttttctggtctgacggcgcttactgctgaattcactgtcggcgaaggtaagttgatgactcatgatgaaccctgttctatggctccagatgacaaacatgatctcatatcagggacttgttcgcaccttccataacgctgtagccaccagaacagatattgcggaacgacaaagagaaacagaaccagattgatgcattgagctttcatcctatgaaattaattgctgttaaaagcattgggtacagaaaatacccatagctccatacccggagtcagtttttaaaaactgtttaaagaaatgcacaagtattgtgattgattttttagttgtttttcttgatgagaagctgatgcaaaattccgtctttataatgaaaatgatgccaaagcgaacgacaaggttgtagttttcactacatgtccatacataaaatggggtaacattcacgcgcctggtagcgttaccaacgctacgctcaaacataatgattctaataaaacctcaggagactactatgcctgaagcaacaccttttcaggtgatgattgtggatgatcatccacttatgcgacgcggtgttcgtcagttactggagcttgatcctggctctgaagtggtcgccgaagcgggcgacggcgcgagcgctatcgatctggcgaatagactggatatcgacgtgatcttgctggatctcaatatgaaaggtatgagtggcctggatactctcaatgccttgcgcagggatggcgttaccgcgcaaattattatcctgaccgtatccgatgcctccagcgatgtctttgcgctgatagacgcaggcgcagacggttatctgttgaaagacagcgacccggaagtattgctggaagcgattcgtgccggagcgaaaggcagcaaagtctttagcgaacgcgtcaatcagtacttacgtgaacgtgaaatgtttggcgcggaagaagatcccttcagcgtgctgacggagcgcgagctggatgttctgcacgagctggcacaggggctgtcaaataaacagattgcctcggtgttgaatatttccgagcagacagtaaaagtacatattcgcaatctgctgcgtaaactcaatgtccgctcacgcgtggcggccaccattctgttcctgcaacaacgcggggcacaataaaaatagcccgatggatttatcatcgggctgagatttatgacaaacgcaaaactgcctgatgcgctacgcttatcaggcctacgtggatcgatcaatttattgaatttacacaattttgtaggccggataaggcgttcacgccgcatccggcataaactaagcgcactttgtcaacagtctagcccgatggcatcaccatcgggcctctttttatttactctcctgcggcgacaaatgttgcatcgcctgcgcgatactacgttcaatcaccgcacggcgagtatcgttggcaggtaagagtttcaacatcatctcccacgcggcaacggcttcgccaaatcgctgctgctcaaaggcattaaacgcatacatgcttagcacacggatattgctatggtccgttctcaccagctgacgtagcagttcaccgccgaggcggttgtcgttgggatcagatgaacgagtcaacgcttcagcgtatcccagtgcagcatcactgtttttcggatcgaggcgatacgcagtggcgtatgcatcggtggcgatactggcgttacccagcgccatgccaacgcggcccaacataatccagccttctatatctcccggatttttttgcagttgagtacgcatccccagcgcaagacgcgacatctcttcttcgttgagcggatcggctttcggatccagcgccctgtccagcaacgccggagcctgtgccgtggcctgctgccagattttcacctgctgataattgccagtctggtagtagctgacgccagccacaattaacgccaccacaatacccggcagataaacaacatatccggcacgcttaccttccggcacgctttgttcaggaaacgcttccggcaccacgcgtacccgacgccgcgagcgggcgtatatgacccaaccgccaatgccaatagccactactggcagcacccacagcagcacggtcagcggcgttaacggcggatcgtaagtgacgaagttgccgtaacgcgccaccatataatcgacaatctcttttttacttttaccttcctgcatcagttcatacactttctgacgcaggtcggtggcaatcatcgagttggaatcggcaatgctgttgttctggcatttcgggcagcgcagttcttcagtgagctgacggaactgttgttcctgtgcttcatctttaaactgcaacacatcgatggtcgccagcgctgagccggagatcatcagcatcagcacgcccaataaaaacctcattgtgcggcctccttactgtatttctcccacagcggcttgatctcttcttcccagacgcgaggattcagatcgcccgcatggcgatagcgaatgatgccgttgccgtcaataagaaacgtttctggcgcgccatagacaccgagatccagccctaacatgccatcgccatcaaacaggcttagcgcgtaaggattgcccagctctttcagccagctgattgccttctggcgatcgtctttatagttcatgccgaccacgcggatgccctgcgcagaaagctgattcagatattgatgttccgcacggcaggtcggacaccaggtcgcccagacgttaagcagtactggtttgccctgagtcagcacatccgcctgataaaactgccccggattgtccagtgattcgagacgaaacttcggcacaggcttgccaatgagcgccgattccagattggtcggatcatccccttcggcattacgcgccagctgccacagcagcgccgcggcaatcgccaggaagataatcaacggaattaacaatactttgcgcttcatacggcctccggcgcagttttttgcggactcacgcgcttacgatagcgaggatcaaacagacacagcagtccgcccaacgccatcatcagcccgcccgcccaaatccagcgaacaaatggtttgtagtaaagacgcacggcccacgcgccgttttccagctcttcaccgagggccgcgtacaggtcacgcgtgatgccgccgtcaattgccgcttcggtcatcatcgacccggcagtgttgtaataacgtttttccgcatacagcaccgtttccggcttgccatcgcgcgttacgccgatagtcgccacaccgccacgccagttcgggccagtcacctctttgacatcacggaaggtgaagcgatattcatgaatatcgacgctatcgccggacttcatgcgcacatcacgctcaacgctatagttctggctaaaggcaatgccaacaattgtcactgccagcccaaggtgagccgccaccatcccccaataactgaaggtggttttcgtgccgcgtgaaatacgtagcgcagcttccgcaattgccagcaccgcaatccagcaggccattgccaggccgagcaccgtcatcgccacaactttgctttcgaacagccacggcaacagcagcgacagcaccagcgtagagatgaaggcgataatcaataaattgcggatcttacgcgggcgatcccgcccccagcgcaccagaggaccgacaccaagcagtagcgcaaacggcaccatcagccaggtaaacatggtgttgaagaacggttcgccaatcgaaatactgcccagtcccagttgcttatgcaccaacggcagcagcgtccccagcaacaccaccagcatcgcagcgaccagcaaaacattgttcgctaacagcaaagattcccgcgaccacagcgcattgtttacgcgtgagcgaactttgtgtccacgcgcggcaaacagcagcagcgaaccgccaatcaccagcaccataaaggcgaggataaacataccgcgcgccggatcagacgcaaacgcgtgtaccgataccagcacgccggaacgcacgaggaaagtccccaacagacacaacgagaaggcactgattgccagcagtaatgtccacgctttgaagctggcgcgttgttcagtgaccgccagtgagtgcatcagcgcagtccccaccagccacggcataaacgaggcgttttctaccggatcccagaaccaccagccaccccagccgagttcgtaataggcccatgcggaaccgagcacgatgccgagcgtcaggaagatccacgctgccagcgtccacggacgagtaaaacgcgcataagtgctgtccagacgcccgctcagcaaagaagcaatggcaaaagcaaacgccaccgagaaacccacgtaccccatataaagcagaggcggatggaagatcagccccggatcctgcaatagcgggttaagatcgcgaccttcaatcgggaagttcggcaacgtgcgagagaacgggttagaggtaaagagaatgaacagcaaaaagccgacactgaccatccccattatcgccagtacacgggccacaatatccagcggaatacgctgactaaaaatcgccaccgcaaaggtccagccgctcatcagcagcacccacagcagtagcgagccttcatgcgcgccccaggtagccgccacgcgataccacaccggaagctgggtattggagttgctggcaacataggtgacggtgaagtcgttgaccacgaaagcattgaccagcaccagaaatgcgccagccacagacataaacagcagccaggcaaacaagcgggaagacgccatcatgcgcgcatctccgcgcgccacgccccatagcggatacacggacagcagcagcgcaattcccagcgccaggcacagcagtccgttaccaatttctggcatcatgatgctgggtccttataaacactcgccgggcgacggtggttagcttccatcgctttctcaacttctggcggcgtatagttttcatcgtgtttcgccagcacttctttcgcgaggatatgattgcctttttccagttcgccctgcaccacaacgccctgcccttcacggaacagatccggcaaaatgccttcgtaagagacatccactgagccttcagcatcgtaaatggtgaaggtcactttcagcgaattgggatcgcgctgcacactacccggcatcaccatcccgccaacgcgcagacgctgaccgacttccggcatttgctgagtttcacgcttgccgtagagaatttcccccggcgtataaaagagatcgatattcgagcgcagcgcatatagcaccagaccgatagtcagcgccagccctgccaacacggcacaggcaatccacaagcggtttttacggcgaatattcatgcagcctcctgctgttgcgcagcacgtaaacgcgcctcacgcgcccgctgttgcgccacgccacgcagaattgcgcgatgttgcatcaccgagtgcacgaccaaaaccaccagcggaataacggtcatcaccaccgccagccagacaaaaaaggcgtaaccgcccattgcgaaaaattcattccaggaagcaaatgcaggggtcatttacggcctcttttcagtatcagttcactcacccacggacggcgtttttccatcagcaaaatcaaattacgcatccgcatcagcgtcagcgtggcagacaggagcaggaagccaaaaatcgaccagcgcagcggcgaacgcatcgccggatcgatactttgctgcatccgcgttgatccctgatgcagggtgttccaccactccacggagtaatgaataatcggcagattcaccacgccaatcagcaccaggatacctgccgcacggcccgccagacggcggtcgtcgaaggcgtgccacagggcaatcacacccacatacaaaaacagcagcaccagttcagaagtcagacgtgcatcccatacccaccaggtgccccacatcggttttccccatgcagagccggtaaccagggcaataaaggtaaacacggcaccaatgggggccatcgccgccaccgccaggttggccattttcatctgccagacaaggccaataaacgctgccactgccattgatgcataaatgcccatcgaccagatcgccgcaggcacatgcaggtagataatgcggtagctatttccctgctgataatcagccggagcaaagccgaatccccagatccagccgacggtaagcacgaccacactggcaattgccagccacggtataaaccagccacagatttgatacagccgtggtgggatcgccagttgatgcagtgttttccacatagtttcgataccagactcgaacaaaaatcagtaatccagcgttattgaatgctgattcgtaacgctgccgccgtcgcaaaaggacttaatgtcgcggtgcctgccagcaacgcgcctaaaattgccagatacccgtcaacgggcaaatgcatagaagccgcgtccatcgcggcggtggcaaagatgagtaatgggatagtcagcggtaacaccagtatgctgagcagcacaccaccgcgcttaagtcccactgtcagcgccacgcccggtgcaccgagaaagccaagcgtaggcgttcccagcagcagcgtcagcgccatcacttgccagccataaacatccattcccagtagcattgctaccagtggcgaaaggatgagtaacggcagaccggttaccatccagtgcgccatcaccttcgccagcacaacggcgggcaagggtaacggcaacaacatcaattgttcaagactgccgtcctgcaaatcgtcacggaacagtcgttccagcgccagcaaggatgaaagcagcgcagcaacccagataatgcccggtgcaatacgcgccagcagttgcggctccggaccgatactgagcggaaaaagggtaattacaatcaggaagaaccacagcgggttggcgatttcggcgctatggcgaaacgctacacgcagctcaagacggaaaatgcgccagaacatcatgcggccctcgtttgcgtcagtgaaatgcggcgaattttactttcagcaacgttgagcggctggtgggtagtcagaatcacaatccccccctgctccgtatgctgcgccatacgctgggtcagacgatcgacaccgttaacgtcaatcgcggtaaaaggctcgtcgaggatccataacgtggcacgggtcagccacagacgcgctaaagcgacgcggcgttgttgcccggccgagagctgatttacaggaatatcttcgaatccggcaagcccggcctgcgccagggcttccagacattgtgcggtatcgccatcgcgatgataaaagtgcagattttctaacgccgtcagccgggttttgatccccggctgatggcctatccataacaggttttgatggtagctgtcgcgtacctgatgcaagggctgcccttgccagagaacctcgcctgcgtcagggcgagacaaccccgtcagcaaacggagaagcgttgtcttccccgcgccgttgctaccggtgatttgtacccactctcctgcgttcagcgtaaatgacaagccactaaataaggttcgttcatcccgctcacaaagtaactctctggcttcaagcatacccacgcaataaccctgttaaaaacctggctcgacttcacgcatatcgggcagcttgtgcgctatccctttatggcaatcaatacaggtttgcccatctttcaccgcctggtcatgcatcttcgcggcaaccgatttctgggcggttgtatccatatactcgaagttgtgacagttacggcactcctgcgagttattgtccttcatgcgccgccactcattctgtgccatcgtcagacgatgagcttcaaatttctgcggcgtgtcaataacgccaaaaattttaccatacagctctttacttgctttgagcttgcgtatcatcttcggcacaaactcgtgcggaacgtgacaatccggacaggtcgcacggacgccgctacggttgttgtagtgcacggaatccatgtattcctgatacaccgtgttgcgcatttcgtggcagctaatgcagaactcttcggtattggctttttccatcccggtgttaaagccaccccagaagacgatgccgccaacaaaaccgatcaacagcagcgtccccagcgccagacggctgggggtacgccaccatttccacaggcgcttaatcagaccaggcttacggtcagaatttcccataataacctcttatttcccgtaaccttttgatggggtaaaggtattccccacgattggcgcggtatcggcctgcggtacgtgacattgcagacagaaataacgacgcggagccacttccgcgcccactttgccgtcgctgtccataaagtgagtaggactgatacgcggcgcgccagtggtgcgatagctttcgacaccgtggcactgcaagcagcgattggtattggtcgttacctgataaccttcaacgctatgcgggatcattggcggctgattcacatagttcagcggcatccgatcctgctcttttggcatccgaatggccccttcctgtgtcccggatacttccggcgactggctaaaatcgacgccattagccgcccaaaccgcgccgcttaccaccagggccagcatcgccgtccattgacacagcgctttcttcaggtcatggcttttcatgatttcgctcccgaactccatcgtgtagttattgtaaatacatcctcagaacagacatccacgcagcgaccgcacgtcatgcaatcgcggctggtgacctgcaccgggctttgttcatccagcaccggggcacgtagcacatgcggttccgggcaaacatgaaaacaatccatacagcggttacatttctgccgatcggtggccgcaacggtaatcacacctttgctacccagcacgccatacagcgcgccaaccggacaaatgtgcccgcaccagccgtgttcaacgaccagtagatcaaataaaaacagcgcgagaataagcagcgcgccgctgccgaagcccattaccaggctacgccccatcagagaaacggggttgatccattcccaaatgagcgtgccagttaaggctgatcccaccagaatgaccaccaacagcacgtagcgaatgtggcgagggatcgtcgcagactgattgaggtcaaagcgcctgcgtaaccagttcgctaagtcggtaatcgggttcagcgggcagacccagctgcaaaataatcgctttcccgccagggcgtagagcacggtgataatcaccgcaccggtcaacgccaccgtggcaggcagatgaccactggcaagactttgcagcgtcatcagcggatcggtcagcggaacggtgtcgaataacaggctactgctgtagttgccgtgcaagatccacacaccaaaccatggaccgctcaaaaacatccccagcacgaagaactgacaaaggcgacgtaacaccagccaacggtgactgcgccaccagccttttttctccagcgcctcgcgcccggcgtcacgtttacgatttgccattgttcccctccagccagccgaagcggtaatggtgacctaactcccctttcgccagtgacagcggtaacaccttgattgccggttgttccagcacgcatactttttcgcacttaccgcaaccggtacaggcgtcgctgtgaaccgtcggcagaaagcgggcgtgcttaccggtacgcgtgttgcgctccagctccagggtgatggcctcatcaattttcgggcattcgcgataacaaacatcgcagcgcagcccctgaaagttgagacagttttcctggtccaccagtaccgccagccccatccgcgcgtcgtcgatcgattcaatctcacgatccagcgcaccgcttgggcacactttggcgcacggaatgtcctcacacatttcgcaaggaatatcccgtgcgacaaaatatggcgtgcccgccgacagaccagaggccagcgtcgccagttttaaggtgtcgtaagggcaagcctgaacacactgaccgcaacgcacacaggcactggcaaaggcgttctcgtttatggctccgggcgggcgcaaccgcacgccagatgcgcgtgcggtttgctgttgtaaccccagcgccacacccacggcagccagcccgcctgctgtgcgaacgacatcgcgcagaaagcggcggcgaccattttgaggtttcgctgaccgggacataatggcttacaccttctccagtttgaccgcgcacttcttgaagtccgtctctttcgagagcggatcggtcgcatccagcgtcagtttgttaaccaactgtgcggcgtcgaagaacggcatgtacaccaggccctgtggcggacggttacgaccgcgcgtttcaacaatcgagatcacttcgccacggcgagaaaccactttcactttgtcgccacggcgcagatcgcgcgctttcgcatccagcgggtgaataaacaggaccgcttccgggaaggcgcggtgcagttctggtacacggcgagtcatactgccggtgtgccagtgctccagaacgcgtccggtagagagccacaggtcgtactcttcatccggtgcttccgccgccggttcgaatggcagtgcgaagatcaccgctttgccatccggtttaccgtagaacttatagccttcgcccgctttcacgtacgggtcgttaccttcgctgtaacgccactgcgtttctttaccgttcaccaccggccagcgcagaccgcgcgctttgtggtagtcatcgaacggtgccagatcgtgaccgtgaccgcgaccaaaccatgcgtactcttcgaacagccctttttgcagatagaagcccagctcgcgggattcatcgttcagctgatcttccgccagttcggataccgggaatttgctcacttccggtgtggcatacagcacttcgtacagcgttttgccacgcagttccggtttcttcgccagcagatcttccggccatacttcttcagttttgaagcggcgggagaactggactaactgccagagatccgatttcgcttcgcccggtgcctgtacctgttgacgccagaactgagtacggcgttcggcgttaccgtaagcgccctctttctctacccacattgcggtcggcaggatcaagtcggcggccagcgcactgactgtcggatacggatcggagacgatgatgaagttgcgcggatcgcgccagcccggcatacgctcttcattgatgttcggcccggcctgcatgttgttggtacacatggtccagtaaacattcagtttgccgtctttcagcgcacggtcttgtgccaccgcgtgcagaccgattttcgccggaatggtgccgctcgggatattccacttcttctcgcagatatcacggtgtttctcgttggtcaccaccatgtccgcaggcagacggtgagcaaaggtgcccacttcacgcgcagtaccacacgcagaaggttgcccggtcagggagaacggaccgcaacccggctgggaaattttgccggtcagcaggtgcaggttgtagaccaggttgttagcccacacgccacgagtatgctggttgaagcccatcgtccagtaggagatgactttcttgttcggatcggcatacagctgcgccagttgttctaactggtctttcggcacgccggtcatttcggcagttttttccagcgtatactcggcaacgaaggctttgtaatcttcaaagctcatcggttcggaggcgtcagaacccggattcttcgctgctttttccagcggatgggtcggacgtaaaccgtagccgatgtccgtcgcccctttgcgcaggttaacgtgcttgctgaagaagtcctgatttatcgcattgttttgaatgatatagttggcgatgtagttcaggatcaccaggtcagattgcggcgtaaagatgatgccgttatccgccagctcgaagctacgatgctggtaggtagaaagcaccgccacggtgacgttctggttagagagacgacggttagtgatgcgcgaccagaggatcgggtgcatttccgccatgtttgcgccccacagcacaaacgcgtcagcctgctcgatgtcgtcatagcagcccatcggctcatccataccaaaggtacgcataaagccaactactgccgacgccatacagtgacgcgcgttcgggtcgatgttgttcgaacggaagcccgctttaaacagcttggacgcggcataaccttcccagatagtccactgaccagaaccgaacataccgatcgattccggccctttttctttcagggcggttttgaatttctcttccatcacatcgaaggcctgatcccaggtgattggggtaaattcgccttctttgtcatatttaccgtttttcatacgcagcagcggctgcgtcaaacggtctttaccgtacatgattttgggcaggaaatagcccttaatgcagttcaggccacggttaaccggtgcgtccgggtcgccctgacaggccaccacacgtccctgctgcgttccgaccagaacgccgcaaccagtaccgcagaaacggcacggcgctttatcccatttgatggcttcctgctgaccaacaacggcgcgggcaacgcccggcacgctgagaccggcagccgccgcagcggccgcaacggcgttagctttcataaagctacgacgactgagtttcatggtgtttcctcaccttgctcttcctgctggtgataaaccagcgacaccgccagcacgccctctacgttgcgtactgactcaatggtttggatcagcgtttcgctgtcttctgcttccaccaccacaatcaactgaccgctcggcgcgtcgctgacagcaacttcacagccgggaaaggcgttcagttgggtgctgatgtctgaaattcgttcgcttttggcctgcacgaccaggctgcaaacttgccagttagtgtgcatggagatactccgcagttatggctgataccggacagctggctgcacatgctccacatccgttgcaaagttggctattaagttgcggctggtagatcccggagagcgtcgggcgaaagataattgccattggctcacagctatcctgacagcggcggcattcaactgactgatacgccaggcacgcgtccccgatggtgaactgcaaatcccaggccctggtgtggcgcggagaaaatagcgattcggggcaagcctgcgcgcaggcgtaacagaagctgcactcgttatttttgaaattaacgctcggatagccgcccgcgccgcgttgcagaatgttgttttcacaagcattaatacaggcgtcgcagcgggtgcaatgggtcagaaaatgagattcatcaccggaccagggcggacggataccgttactggctttgcgccagcgaccagtgagtatgccccgacgggatgcatcaatcttcacattgaccttccatcattaacgcgctctgaaaattgagagcgaccaaataaaccgcataattaataagccatttttatagccgctaagatattaaaggatgtgtcaaagatgcataccccgatcggggtaaaacctgtagcaggatcaaaagagtggcgggaagcgtggcaaaaacgggcttttgctcacatttcaaatggttataaatatatttatatagcgattgattcaccagagatatttctgctggtttgctctctcattagaatttaacactaaaagagcaggtaaaattgtctgaatgttctttaagttattcataaagcaaattaataaatctgatgaatatgttaaccttcagcgacatcatcggtgaaaacctataaatgaagaaggaaagcaaaaaaatgaagaccattctacctgcagtattgtttgccgctttcgctaccacttccgcctgggcggcagaaagcgtccagccactggaaaaaatcgcgccttatccacaagctgaaaaagggatgaagcgtcaggtgattcagttaaccccgcaagaagatgaatctaccctgaaagtagaactgttaatcggtcagacgctggaagtcgattgcaatttgcatcgtctcggcgggaagctggaaaacaaaacgctggaaggctggggctatgattattatgtctttgataaagtcagttccccggtttcaacgatgatggcctgcccggatggcaagaaagagaagaaatttgtcaccgcgtatctgggcgatgctggaatgctgcgttacaacagcaagctgccgatcgtggtgtatacgccagacaatgtagatgtgaagtaccgcgtctggaaggcggaagagaaaattgacaacgcggtagttcgctaaactgccgtgaagtgcggcaccccgtaggtcagacaaggcggtcacgccgcatccgacatccaacgcccgagccggttgcctgatgcgacgctggcgcgtcttatcaggcctacaccgctgtgaagtgcggcaccccgtaggtcagacaaggcggtcacgccgcatccgacatccaacgcccgagccggttgcctgatgcgacgctggcgcgtcttatcaggcctacaccgctgtgaagtgctccaccccgtaggtcggataaggcggttacgccgcatccgacatctaacgcccaagccggttgcctgatgcgacgctggcgcgtcttatcaggcctacaccgctgtgaagtgctccaccccgtaggttggataaggcggttacgccgcatccgacatccaacgtccgagccggttgcctgatgcgacgctggcgcgtcttatcaggcctacaccgctgtgaagtgctccaccccgtaggtcggataaggcggttacgccgcatccgacatctaacgcccaagccggttgcctgatgcgacgctggcgcgtcttatcaggcctacaccgctgtgaagtgctccaccccgtaggttggataaggcggttacgccgcatccaacatctaacgcccgagccggttgcctgatgcgacgctggcgcgtcttatcagcatacgccacatccggcataccatgccggatgtggcgtatcattacaacgcaatatccgccacttctttttgaacgggttgcggtttcaactgcggtttcggcgtactatctgctgcctgcggcttgtcgtagttcaaccccagcacttcgctggtgtactgcaactcgcgttctgttgccgctacatcaccgttcagcttgcgtccataagacggaacgatcgctttcaacgtagcctgccattgcgggctggaaacacgatcgccaaatactttttccagcagattcaacataatcggcgcggcggttgacgcccctggcgatgcccccaggagcgcggcaatggttccttgctggtcactgacgacttcagtacccagacgcagtacgccacctttctcggcatcacgcttgataatctgcacgcgctgccccgcttgccacaaacgccagtcctcttttttcgcctgcggatagtactctttcaacgcttcaaaacgatcctcttcactcaacatcacctgactcaccagatatttcaccagatcgaaattatccagcccgacgtgcatcatcggcatcacgttagaggtggtggtggaactcattagatcccacaatgaaccgtttttgaggaatttggttgagaaggtggcaaatggcccaaacagcactacgcgtttaccgtccagaacgcgggtatcgatatgcggaaccgacatcggtggtgcgccaacggatgctttaccgtaaaccttcgccagatggtgattaaccacgtccgggttttccgaaacaaggaactgtccgcccaccgggaaaccggcgtagtctttcgcttccggaatccccgattcctgtaacagcttcagcgccgcaccgcccgcgccgataaagacaaatttggcacgaatgttctgtgcagtgccatttttcagatcggcaacggtaacggtccaggtgttatcgtcattacgctttagggcgcggacttcgctgctgagttgcagcgagaagttagatttcttctgcaaggaagcaattaactggcgggtgatctcgccgtagttcacatcggtaccaatttccgtacgcgtggctgccactttctgttgcggatcgcgcccttccatcactaacggtgcccactctttgatctgcgcgtgatcttcagagtaacgcataccgcgaaacagcgagctttgttgcaacgcggcgtaacgggcgcgcaggaaattgacgttatcctcgccccagacaaagctcatatgcggaacggtattgataaatgaacgcggagtacgcagcacgccgcgctcaacctggtgcgcccagaactggcgggaaatctgaaatgcttcgttaatggcgactgctttttcaatactgatgctgccatcggcgttttgcggggtgtagttcagttccatcagtgcagaatgcccggttccggcgttattccagccgttcgaactctcctgcgcgacaccctccaggcgctccaccatggtcatcgaccattcaggctccagctcgcgtaaataggtccccaacgtggcgctcataatgccgccgccaatcaacagtacatcagtttcctgctcctcggacgctttcgcttttgccgccatcgaaacggcattaagccccacggccatcgagaagagcatggcagtcacttttttcatcttgttaatgccttacttttagtcgctttattgcaggtgagatttgcgcggcatcaacggtaacacttaagtaacaacatttaaataatgtttataaattatattctaattttagaaacattataatttcgttgattaattatagggttattagaaatgaagggatttttagcatattgacctgacggcagcagtccgccaggtcagcgtcgtaatattatgccgtccgggcaacggcatcacgcgaagcggcatcgcgctcttcgcccgtcagctcgctaagttgcccattgcgcatttccagcaggcggtcggcgtggataaagtaatgatcatcatgactgatagcgaaaatagttttacccatctcctgcatcagcggcagcaacacctgataaaactcacgacggaagtgtggatcctgatccgccgcccattcatccagcaggataatatcgcgttcttctgccagcgccagcaacagcgccacgcgttttttctgcccttttgataacttcaggttaacaatacgcccgttgcttaactcaagcttatgagccattttcagctgcgccagccacttctcaaccagttgcgggttagcgggtttaccctccggccccagcagttgatcaaacagccagacatcggtaaacactgccgaaaacagtttgcgataatcttccggttgttcgccgctgacaggtttgccatccagcaagatttcgccgctttgtggctgatacaagcccgtcaacaacatcgccagcgtcgattttccgctaccgttgccgccaatcagaaacagcagctcgccacgtttgatggtgagattaatcggaccaacggaaaacgcgttatcctgataagcaaacgtcacgttacgcagctccagcgtttgccagttgggaaacgcctgcgggcgcggaaactctgctttgaaaggcgcgagcgcgaatttgttcagcttgttaaacgccacctgcgccgtcagcagcgtcggcaatgcgccaaccgccgaaagcagcggcgtacgcaggaataaaagcgtcaacgaataggtcgcggcaacgttggtatcagcccaaccgaggctgttcgccatccagaacaccaggccgattgcgcccagcatcatgatgtttgaccagttcacggcactaagatggaaggtgtctgcgcgaataatatggtggcgatactcttgcgcatcaggaatgtagaggttgttaaacacatactcggcgcgttcccggttcagagtcagctctttgcgcccttcaagtacagtttgaaaatccgtgtacagcttgtcttcggtttcacgcagggtcgccatatgtttgtacacccgcgccaccagcacaaaaccgccccagatggtgatcgccatccagatagccgttaccagcaacattttgcccgacagcatccacagatacgccgctgaaccgatagtgagaatgatcccctgcaccagttccggcagacgcacaaaagcaatggtgatattgcgcacatcgctggttaaccccgccagcaacgaggcgctaccgagttgttcaatgcgctcgacgtgagtatccagaatccgcttgataaattcactacgcagtcggtaaacgaagtgatgccccaaagtggtgagcgccagttgcgatccgagagtgactgccatcaacagcagcaataatcccagaaactccggcaacaccagcagactggtatccgccgtttcgataaggcgctgattgataaaagcaattaagccaatgcctaatgccgcactggcgaggcttagcgccatcacactgataaatggccagcgatactgccgccagacaagtacaagaagttccatgcagaaaacccggacaatgaattacagcccgcagtttaaacatcttcgcgcgcacagcaataataattcttatttttattcttttttacctgcctgacggaatgtcaggttgtagcggcagtcgatggtgagtggatgaaaccccgctttcaacggttgaataccgtgataaaacagccgcgattcaccgccccataccaccacatcgccatgttccaacaacaaacgtttgagcggatcatttcgtttcaggccgccaaattgaaaaatcgcgggtaagcccagagaaacagaaacaattggcgcgcgcagatccggttcgtctttatcctgatgcagcgacagtttcgcgccaggagcgtagcggttgataagacaagcatctggctggaaatctggatagcccgccgccgtagccgcacgttgacataaattatgaaaactctgtggcatggcgggccacggtttatttgtttgcggatcaatgggcgaatagagataaccttgccgatgggtcgtccagcccagatgcccacagttggtcatcgccaccgacatggtatatcccccgggggtgaccatctggcgaaacggcgactggctggcaacgtcattaatatcgcggatcagttgctccgcagcgttaaaagcaaaacgccgtaaaattaccgcaccagccgccagtggctcttgccacggttcagcatcggcaaacagatccaacattacctctcctcattttcagcttcgcggcgcagcagttgcgctttacgcgacacgccccagcggtaaccggaaagtgtgccatcaccacggaccacccgatgacagggtattatgatagccagcttgttggcggcacaggcgctggcaacggcccgtaccgctttcggtttgccgatggcgttagccagttgctgataactgacggtttcaccgcaaggtatcgtgcgcagtgcctgccagacttgttgctgaaaagcagtgccgcgaatgtccagcggtaacgtcagcggcgtatcgcgttgattgaggctggcgatcacttcacgcacatgttgctgaaacatcagatcggcaggcgcgttgtcggcagcgggaaacatctgctgcaactcgctgattagtgtcgcgtcatcatcgcccagcaatatcgcgcaaatcccccgctcgctttctgccaccaggcaacgacccagctcacaatcagccagcgcgtaacgcaccgccagattttcgccaccgtgacggaattgtttagccgtcatgcccagcgtttcgtcagctttgcgatagtaactgctgctgtcggggaatccggcgttaagaatagacgtcgtcacgctctcccctttcgccagcgattcgcgcaaacggcgagcgcgccaggcctgttgccaggctttaggcgtcattccggtagtcgctttaaacaaccgatgtagatgaaatggactcatcgccacctggtcggctaaggcttccagcgttacaggcgtttcctgttccagcagtcgacacgcgtgggtgattttatccaaccgatgttgctgggcattggctttttctggctgacaacgtttgcaggggcgaaagccagcggcgagtgcctcgctggcatttgcgtagaaggagacgttttcccgcaaagcatgtctggcgcggcaagacggacggcaaaagatgcctgtggtacgcacggcgaaaacgaattcgccgtcggcattcgggtcgcgggctaagacagattgccagcgttgatcgtcagttaagcatgtggcttttttcataatcagctccctggttaaggatagcctttaggctgcccggtcaccatcacgcaaaaaccaacaatcttgcgctttaatttttttcgctgacaaggaagcttttaaactgtggtgacatccaggttttaaagctatcgccttctttggtgatcatataaaccgccagcccttcccggcgaacaacctctttagctttctccggcccgagtaccatcaagccagtatcccaggcatcggcttccagcgccgtcggagcaatcaccgtcacggataccagattgtgttcgatgggacgcccggtttgcggatcgataacatgggaaagacgtttgccgtccagttcgtaatagttacggtagctgccagaggtgctaatcccatgaccgttgatatccaccacagcctgaaccgcgttttctttatcggttggtttttgaatcgctacccgccacggcaggccttcaccgttcataccacggctgttcagcgcgccgcccaccgacaccagatagcgggaaatcccttcctgctccatcaagcgtgccaaatgatcggccgcatagccttcgccgacggtggagagatcgacatataaatccggcaggtctttttgcagatattgctgatgcgactgattgatgaccgtcaggtgctgtaagccggttttggctttcatcgcatcgatctgttcctggctcggaatttgaaccggctgttgttccgggccaaagccccacagattcaccagcggcccgacggttatatccatcgcgccatcggtcttcgcgccaatgcgcagcgaggtggtgacgatatcggccatcgcttcacttaccggccacggcgataaactttgcgagtcgttaaagcgcatcagcgcggaatcttttttataggtcgaaagcagctgatcgtcggcgtccagttgggtctgaatcttttctttaagttcggcgctgcgtttggcgtcaatgcccgggatgctggcacgccagaaggtacccatagttttgccttcaagaacggtaacttcagtagcgtgggttttggcgggttgtggtttttgatcgcaaccaacaaagaagagcgcggcagccagcagtgccacgcgggtaaagcttatttccatacgtgattatcctcatgcgaacggtcgcaagagtacaccaaaaaactgagtttgtacgctgaaaacaatgaaaaaagggcccgcaggccctttgttcgatatcaatcgagattagaactggtaaaccagacccagagctacgatgttatcagtgttgatgccagcgtcacgagtgaactggttgtcgtccagcaggttgattttgtagtcaacgtaggtggacatgtttttgttgaagtagtaggtagcaccaacatcaacatatttcaggatatcttcgtcgtcgtagccacgacccaggtttttacctttagactgcaggtaagccagggacggacgcagaccgaagtcgaactggtactgagcaacagcttcgaagttctgtgctttgttcgcccaacccagggaacctacgcgagttgcgttgtaggtctgggtgtactgagcagccaggtagatgttgttagcgtcgtatttcagaccaccagtgtaggtttcagcacggtcgccgttaccgatgtaagcagcggtgttctgagcatcagtacgtttggagctggagatcgcaccaccgataccgaaaccttcgtaatcataagtgatagaaccgccgacgccgtcgccgttttgacgcagtgcgtcacgaccgttgttagttacgccactagtaaagccttcaccagatgggttgccgtttttaccctggtactgaacagcaaagttcaggccgtcaaccagaccgaagaagtcagtgttacggtaggtcgcgaagccgttaccacgctgctgcatgaagttgtcagaaccgtaggtgtcaccaccgaattctggcagtacgtcggtccaggaagttacgtcataaacaacgccgtagttacgaccgtagtcgaaagaacccacatcctggaatttcagacctgcgaatgccacacgggtccaggagttgttttcgttttcagcgctgttgccctggatctgatattcccactggccgtaaccggtcagctggtcagtaacctgagtttcacctttgaagccaagacgcatgtaggtctggtcgccatctacatctttgttgtcagagaaatagtgcaggccgtctactttaccgtacagatctaatttgttgccgtctttgttgtaaacttcagcagcgtttgctgcgcctgctaccagcagagctgggaccaggagggacagtactttaactttcatgttattaaccctctgttatatgcctttatttgcttttttatgccactgcatactgattaaccctcattaatcagtcggcaagtccattctccccaaaaatgcagaataatccaacacgaatatgatactaaaacttttaagatgtttcatttatcgctatagatgtttcaaaatgtaaatgcaagggaactttttaagattattgcggaatggcgaaataagcacctaacatcaagcaataataattcaaggttaaaatcaataacttattcttaagtatttgacagcactgaatgtcaaaacaaaaccttcactcgcaactagaataactcccgctatcatcattaactttatttattaccgtcattcatttctgaatgtctgtttacccctatttcaaccggatgcctcgcattcggttttttttacccttctttacacacttttcattattctgtgctaccacagaaaaactataacgcttgttaactatttcacaaataattaacatccgcataatttccagcaatctttgtttatttgcaattatttttgttgggctttttgtaggttatttgtacagcaaaatggcgcttgtacatctatttcccccaatgcaggatgataaatatcacgggagaatagagaatcatcaatcaggtaagagtctggaatttcacactgtaccctttatactgccctatcacttcgcgaagttttaacaggtcataaacacgaatgcgtcagaaagagacaacggccacgacccgcttttcactcctaccggggagcattacccgcttctttttactgttgatcattgtgttactggtgacgatgggtgtaatggtacaaagcgccgttaacgcctggctgaaagataaaagttaccagattgtcgacattacccatgctatccaaaagcgcgtcgataactggcgttacgtgacctggcagatctacgacaacattgccgcgacgacctccccctcctccggcgaaggtttacaagagacgcgcctgaaacaggatgtctactatctggagaaaccacgccgcaaaacggaagcgttaatctttggctctcacgacaactcaacgcttgagatgactcagcggatgtccacttatctggatacattgtggggcgcagaaaatgtaccgtggtcgatgtattacctgaatggtcaggataacagtctggtgctgatctcaaccctaccccttaaagatctcacctccggatttaaagaatcgaccgtcagcgacattgttgattcacgtcgtgcagagatgttgcaacaggccaacgccctcgatgaacgcgaaagcttttctaacatgcgccgcctggcctggcagaacggtcattactttacattgcgtactacctttaaccagccaggacatctggcaacggtcgtggcttttgatctgccgattaatgatttgatcccaccgggtatgccgctggacagtttccgccttgagccagacgcgacggcaacgggaaacaatgataatgagaaagaagggacggatagcgtcagtatccactttaacagtacgaagattgaaatctcctcggcactcaactctaccgatatgcgcctggtctggcaggttccttatggcaccttattgctggatacgttgcaaaacattctgctgccactgctgctgaacatcggtttgctggcgctggcgttatttggctataccacattccgccatttctccagccgcagtacagaaaacgtccccagcacggcggtcaataacgaattgcgcattttacgggcaatcaatgaagagatagtctcactgctgccgctcggcctgctggttcacgatcaggaatcgaaccgcactgtcataagtaacaaaattgccgatcatttgctgccgcatttgaatctgcaaaacatcaccaccatggcggaacagcatcaggggattattcaggcgacgatcaataacgagctgtatgagatccgcatgttccgcagccaggtcgcgccgcgcacacaaattttcattattcgcgatcaggatcgcgaagtgctggtaaacaagaaactcaagcaggcgcagcgtctgtatgagaaaaaccagcaggggcggatgatctttatgaaaaacattggcgatgcgctgaaagaacccgcacagtccctggcggagagcgcggctaaactcaacgccccggaaagcaaacaactggcgaatcaggcagatgtgctggtgcggctggttgatgaaatacagttagcgaacatgcttgcggatgatagctggaaaagtgagacggtgctgttctccgtgcaggatttaattgatgaagttgtgccttcagtgttgcctgccatcaagcgtaaaggtctgcaactgctgattaacaatcatctgaaagcacacgatatgcgccgcggcgatcgcgatgccttacgacgtattttgctgctactgatgcaatatgccgtgacctcaacgcaattgggaaaaatcacccttgaggttgatcaggatgagtcctccgaagaccgcctgacgttccgcattctggacacgggagaaggcgtaagtattcatgaaatggataatttgcacttcccgtttatcaaccagacccaaaacgatcgctatggcaaggcggacccgctggcattctggctgagcgatcaactggcacgtaaactgggcggtcatttaaacatcaaaacgcgggatgggcttggtacacgctactctgtgcatatcaaaatgctcgcagctgacccggaagttgaagaggaagaagagcgtttactggatgatgtctgcgtaatggtggatgttacttcggcagaaattcggaatattgtcactcgccagttagaaaattggggtgcaacctgtatcacacccgatgaaagattaattagtcaagattatgatatctttttaacggataatccgtctaatcttactgcctctggcttgcttttaagcgatgatgagtctggcgtacgggaaattgggcctggtcaattgtgcgtcaacttcaatatgagcaacgctatgcaggaagcggtcttacaattaattgaagtgcaactggcgcaggaagaggtgacagaatcgcctctgggcggagatgaaaatgcgcaactccatgccagcggctattatgcgctctttgtagacacagtaccggatgatgttaagaggctgtatactgaagcagcaaccagtgactttgctgcgttagcccaaacggctcatcgtcttaaaggcgtatttgccatgctaaatctggtacccggcaagcagttatgtgaaacgctggaacatctgattcgtgagaaggatgttccaggaatagaaaaatacatcagcgacattgacagttatgtcaagagcttgctgtagcaaggtagcctattacatgaacaatatgaacgtaattattgccgatgaccatccgatagtcttgttcggtattcgcaaatcacttgagcaaattgagtgggtgaatgttgtcggcgaatttgaagactctacagcactgatcaacaacctgccgaaactggatgcgcatgtgttgattaccgatctctccatgcctggcgataagtacggcgatggcattaccttaatcaagtacatcaagcgccatttcccaagcctgtcgatcattgttctgactatgaacaacaacccggcgattcttagtgcggtattggatctggatatcgaagggatcgtgctgaaacaaggtgcaccgaccgatctgccgaaagctctcgccgcgctgcagaaagggaagaaatttaccccggaaagcgtttctcgcctgttggaaaaaatcagtgctggtggttacggtgacaagcgtctctcgccaaaagagagtgaagttctgcgcctgtttgcggaaggcttcctggtgaccgagatcgctaaaaagctgaaccgcagtattaaaaccatcagtagccagaagaaatctgcgatgatgaagctgggtgtcgagaacgatatcgccctgctgaattatctctcttcagtgaccttaagtccggcagataaagactaatcacctgtaggccagataagacgcgttagtgtcttatctggcatttgcaccgattgccggatgcggcgtaaacgccttatccggcctacgattcccattatttcaacaaattacattaaagtaggccagataagacgcgtcagcgtcgcatctggcatttgcactgaatgccggatgcggcgtaaacgccttatccgtcctacgaatcccgcgatttcctgaccctctcggcatataacgtcagcgtctgttttatcacatccagcgttaccggcttcgacaggcagctgtccataccggactccagacaccgctgcttctcttcagccaacgcattagcagttactccgattaccggcaacgtcagtcccaactgacgaatgcgttgcgtcaagcggtaaccatccatatttggcatgttgacgtcgctaagcacgatatcaatatgattcttgctaagtacattaagcgcatcgacgccatcattcgcggttttacattgatagcccaacgatcccaactgatctgccagcaaacgccggttaatcggatgatcatccacgaccagaatcatcatatcgtcattatcgctgaccgctttgtccgttgacggcagagcgttagcaggatcgtcgctctccatctcgatcaaataaatacgcgccaacaatgccggtagctcatgcggagcagccacactgtgtacccactcccctggcgctttctccagcggaataccaatatggcgacgacagaaggtcactaccgctctgccctgccattttttactcactacctcgtcagtgatcaacacatcttcgggagtcggttcctgcccttcgtatgttgtaacgacgatgccgctgcgctgcaaactggtttccaggaactgacagagcgacgcattgcggaccgccagccagcagcgtttaccactcaacccttccacgccttttttctgcgggtactgagcgccgtacaacggaatacgcacggtaaactggctgcccattcccggttctgaatctaccgagatatcgccgtccatcatgctgatcagtttttcacaaatcgccagacccagaccggtcccctggaaattacgctgtacgcccgttccgacctggaagaagggatcaaacaagcgcaccacttctttcgccggtatccccacgccggtatcgcgaacacggatagagagataatcgccatccgcgcgaacatgcaaaactatacagccggtatcggtgaattttatggcgttactcaacaggttggagatgacctgctgtaaacgcatcgggtcgccatttaaggccactggcacatccggttcaataaagcagtacaagcctaactgcttgcgtaccaccagcggtaaatagttggcggtgatgtggttcatcacttcacgcggtgaaaactcacgcggttcgatcttcaactgttccgattcaatcttcgagaaatcgagaatatcgctgataattttcaacaacaggctggaagagttgttcattgccgtcaccagccgatcgacgcctttcggtaactctttggtttgcaacagatccaggttaccgataatgccatacagcggcgttcgcagctcatgactgacggtggcaaggaacatcgattttgactggctcgcctgttccgctgcttgtgccatctcctgcaacgactcttccatcttcacgcgcgaagaaacatccaccagcacacaaatggccacgttttcattacgatagcgcgaatggacgaagctgatttgcagattggtattgttgctggtcaggacatcaacaaaattgacctgctgcccacagataatttgcgtcagtcgttggcggtcctcatgcgtaagcatattgagataggtatgcgccagttcgttacttaaaatattgacgccatcagcggtacgcaaaatgcagatacccactggcgcggaggcgacaatcttgcgattgaactgctcatgttcttccagtcgcagggcgtcgctttccgccggaatgaaaatacgtcgctcgtacatccgtgcgagagtaaacaatgcagctccggcaagcacattcagcaaaattgcgttaaggatcaacatgcgaatgcgttccagcaccttatcaaccggcaccgaatacacgatgcttagcgatgagggtggcagatttttcttcagcaccagctcccggaacccttccgtatagccaaaccaggagcgttcctgcatccagcgaggatcgcccttaattttactttctggtccggtaagcgaaatcagggtatgaccattttcatcaagaatggtaacccccatcggcaacgtacccggtaagaaaaagttctccatccggatggtctgctcgacacccaaaagcgcctgcaaccggttcgccagataaactggcgtcaacgcgtaaaaatacccgacgccagggcgcggaccttcgctgatccagtagaggttactgccgctatcatcttgtggtgcatttcgatatttattgatgcgttcatgcaaagctttcaacgcggtatcgcgttccactggcatatcacgcagaccgaaattggccatgcagaggttatcgctgccgattaaaaatacccggtttagatcgtaagccgcagaaaaattatcgcgccagtagcgcataaaccacgccaatgactccagagaacctcgccaggtgttactcattgcggaacaatcggagtcggcaaacagcggttcaaacgcaggcacatccgcctgcgtttctcgtccacgcggggaaagcacaccgttttctgccgataagcgattttcggcgatgtacttcagctctttcatcacatcagaggtgcgttgaataaagcgctgagcctgatcggaactcagattaaattcctgacgaatttccgattctcgctgatgtaacgcattaacgatgtaaaaaacggatgaaaaagcaatcaacagccagagcactaacgccaatgctctgaacatgtagcgcgaggctttcagggttgtacgaaaagaagcaaggtatttcaaaggggcgaagctccgcctcaggtgaccgatggagtgtggttaaggtagcggtaaaagcgtgttaccgcaatgttctctcttctctggaatatgatacaccgccgagaaatcatcaccttaacctctgataatcgtcatataccggacaagactagtggatttcagcatgcattatatgaagtggatttatccacgccgcttacgcaatcaaatgatcctgatggcaatcctgatggtcattgtcccaacgcttactattggttatatcgtagaaacggaaggacgttcagcagtcttatctgaaaaagagaaaaaactttctgccgtggtcaacctgcttaatcaggcactaggcgatcgctatgatctctacatcgacttaccacgtgaggagcgtatccgcgcattaaatgcagaacttgcccccattaccgaaaatatcactcacgccttccctggcatcggtgctggttattacaacaaaatgctggatgcgataatcacctacgcgccttcagcgctatatcagaataatgtcggcgttaccattgccgcagatcaccctggtcgcgaagtgatgcgtacaaatacccctttagtttattcaggcaggcaggtgcgcggcgatattttgaattcaatgctccccattgagcgtaatggtgaaatcctcggctatatctgggccaatgaattaaccgaagatattcgccgccaggcctggaaaatggatgtgaggattatcattgtgctcaccgctggtttgctgataagcctgctgttgattgtccttttctcccgtcgcctgagcgccaatattgatatcatcaccgatggcctctcgactctggcacaaaatattcccactcgattaccacaattgcccggtgaaatggggcaaatcagtcagagtgttaataacctcgcccaggcactgcgtgaaacgcggacacttaacgatctgattattgaaaacgctgccgatggcgtcattgccattgaccgccagggtgatgtaaccaccatgaacccagcagcagaagttatcactggctatcaacgccatgaactggtagggcagccttactccatgttgttcgacaatactcagttctacagtccagtactggatacgctggaacatggcaccgaacatgtggcgctggagatcagttttccaggtcgtgaccgcaccattgaactcagtgtcactaccagtcgtattcataacacgcacggtgaaatgataggtgctttggtgattttctctgatttaactgcccgcaaagaaacccagcgccgcatggcgcaagcagaacgcctcgccacactgggtgagctgatggctggcgtcgcgcatgaagtacgtaatccgttaacggctattcgtggttatgtacagatcttgcgccaacaaaccagtgacccaatacatcaggaatatctgtccgtagtactcaaagaaatcgattcaattaacaaagttattcagcaattgctcgaattttcacgtccacgccacagtcaatggcaacaagtcagcctcaatgcattggttgaagaaactctggtactggtacaaaccgccggcgtacaagcgcgggtcgacttcataagcgaactggataatgaattaagcccgattaacgccgatcgtgaactgctcaaacaggtactactgaatatcctgatcaatgccgtccaggctatcagcgcacgagggaaaattcgcattcaaacctggcaatacagcgactcacaacaggccatttcgatagaggacaacggctgtggcattgatctctcgctgcaaaaaaagatcttcgatccctttttcaccaccaaagcctcaggaaccgggcttggtctggcgttaagtcaacgcatcattaatgcccatcagggtgatattcgcgtcgccagtttgccgggctacggcgcaaccttcacgcttattttaccgatcaacccgcagggaaatcagactgtatgactgctattaatcgcatccttattgtggatgatgaagataatgttcgccgtatgctgagcaccgcttttgcactacaaggattcgaaacacattgtgcgaacaacggacgcacagcattacacctgtttgccgatattcaccctgatgtggtgttgatggatatccgcatgccagagatggacggcatcaaggcactaaaggagatgcgcagccatgagacccggacacccgttattctgatgacggcctatgcggaagtggaaaccgccgtcgaagcgctacgctgcggagccttcgactatgttattaaaccgtttgatctcgatgagttgaatttaatcgttcagcgcgctttacaactccagtcaatgaaaaaagagatccgtcatctgcaccaggcactgagcaccagctggcaatgggggcacattctcaccaacagcccggcgatgatggacatctgcaaagacaccgccaaaattgccctttctcaggccagcgtcttgattagcggtgaaagcggcaccgggaaagagttgattgccagagcgattcactacaattcgcggcgggcaaaggggccgttcattaaagtcaactgcgcggcgctgccggaatcgttgctcgaaagtgaactgtttggtcatgaaaaaggtgcatttactggtgcacaaaccttgcgtcagggattatttgaacgagccaacgaaggtactctgctcctcgacgaaattggcgaaatgccgctggtactacaagccaaattactacgcattctacaggaacgggaatttgaacggattggcggccatcagaccataaaagttgatatccgcatcattgctgccaccaaccgcgacttgcaggcaatggtaaaagaaggcaccttccgtgaagatctcttttatcgccttaacgttattcatttaatactgccgcctctgcgcgatcgccgggaagatatttccctgttagctaatcactttttgcaaaaattcagtagtgagaatcagcgcgatattatcgacatcgatccgatggcaatgtcactgcttaccgcctggtcatggccgggaaatattcgagagctttccaacgttattgaacgcgccgtcgtgatgaattcaggcccgatcattttttctgaggatcttccgccacagattcgtcagccagtctgtaatgctggcgaggtaaaaacagcccctgtcggtgagcgtaatttaaaagaggaaattaaacgcgtcgaaaaacgcatcattatggaagtgctggaacaacaagaaggaaaccgaacccgcactgctttaatgctgggcatcagtcgccgtgcattgatgtataaactccaggaatacggtatcgatccggcggatgtataacaccaaaacttgctatgcagaaatttgcacagtgcgcaattttctgcatagccgctcattctccttataaatccccatccaatttatcccttcatattcaattagttaaataactaaatccaataatctcattctggcactccccttgctattgcctgactgtacccacaacggtgtatgcaagagggataaaaaatgaaaacaaaattgatgacattacaagacgccaccggcttctttcgtgacggcatgaccatcatggtgggcggatttatggggattggcactccatcccgcctggttgaagcattactggaatctggtgttcgcgacctgacattgatagccaatgataccgcgtttgttgataccggcatcggtccgctcatcgtcaatggtcgagtccgcaaagtgattgcttcacatatcggcaccaacccggaaacaggtcggcgcatgatatctggtgagatggacgtcgttctggtgccgcaaggtacgctaatcgagcaaattcgctgtggtggagctggacttggtggttttctcaccccaacgggtgtcggcaccgtcgtagaggaaggcaaacagacactgacactcgacggtaaaacctggctgctcgaacgcccactgcgcgccgacctggcgctaattcgcgctcatcgttgcgacacacttggcaacctgacctatcaacttagcgcccgcaactttaaccccctgatagcccttgcggctgatatcacgctggtagagccagatgaactggtcgaaaccggcgagctgcaacctgaccatattgtcacccctggtgccgttatcgaccacatcatcgtttcacaggagagcaaataatggatgcgaaacaacgtattgcgcgccgtgtggcgcaagagcttcgtgatggtgacatcgttaacttagggatcggtttacccacaatggtcgccaattatttaccggagggtattcatatcactctgcaatcggaaaacggcttcctcggtttaggcccggtcacgacagcgcatccagatctggtgaacgctggcgggcaaccgtgcggtgttttacccggtgcagccatgtttgatagcgccatgtcatttgcgctaatccgtggcggtcatattgatgcctgcgtgctcggcggtttgcaagtagacgaagaagcaaacctcgcgaactgggtagtgcctgggaaaatggtgcccggtatgggtggcgcgatggatctggtgaccgggtcgcgcaaagtgatcatcgccatggaacattgcgccaaagatggttcagcaaaaattttgcgccgctgcaccatgccactcactgcgcaacatgcggtgcatatgctggttactgaactggctgtctttcgttttattgacggcaaaatgtggctcaccgaaattgccgacgggtgtgatttagccaccgtgcgtgccaaaacagaagctcggtttgaagtcgccgccgatctgaatacgcaacggggtgatttatgattggtcgcatatcgcgttttatgacgcgttttgtcagccggtggcttcccgatccactgatctttgccatgttgctgacattgctaacattcgtgatcgcgctttggttaacaccacaaacgccgatcagcatggtgaaaatgtggggtgacggtttctggaacttgctggcgtttggtatgcagatggcgcttatcatcgttaccggtcatgcccttgccagctctgctccggtgaaaagtttgctgcgtactgccgcctccgccgcaaagacgcccgtacagggcgtcatgctggtcactttcttcggttcagtcgcttgtgtcatcaactggggatttggtttggttgtcggcgcaatgtttgcccgtgaagtcgcccggcgagtccccggttctgattatccgttgctcattgcctgcgcctacattggttttctcacctggggtggcggcttctctggatcaatgcctctgttggctgcaacaccgggcaacccggttgagcatatcgccgggctgatcccggtgggcgatactctgttcagtggttttaacattttcatcactgtggcgttgattgtggtgatgccatttatcacccgcatgatgatgccaaaaccgtctgacgtggtgagtatcgatccaaaactactcatggaagaggctgattttcaaaagcagctaccgaaagatgccccaccatccgagcgactggaagaaagccgcattctgacgttgatcatcggcgcactcggtatcgcttaccttgcgatgtacttcagcgaacatggcttcaacatcaccatcaataccgtcaacctgatgtttatgattgcgggtctgctgctacataaaacgccaatggcttatatgcgtgctatcagcgcggcagcacgcagtactgccggtattctggtgcaattccccttctacgctgggatccaactgatgatggagcattccggtctgggcggactcattaccgaattcttcatcaatgttgcgaacaaagacaccttcccggtaatgaccttttttagttctgcactgattaacttcgccgttccgtctggcggcggtcactgggttattcagggacctttcgtgatacccgcagcccaggcgctgggcgctgatctcggtaaatcggtaatggcgatcgcctacggcgagcaatggatgaacatggcacaaccattctgggcgctgccagcactggcaatcgccggactcggtgtccgcgacatcatgggctactgcatcactgccctgctcttctccggtgtcattttcgtcattggtttaacgctgttctgacggcacccctacaaacagaaggaatataaaatgaaaaattgtgtcatcgtcagtgcggtacgtactgctatcggtagttttaacggttcactcgcttccaccagcgccatcgacctgggggcgacagtaattaaagccgccattgaacgtgcaaaaatcgattcacaacacgttgatgaagtgattatgggtaacgtgttacaagccgggctggggcaaaatccggcgcgtcaggcactgttaaaaagcgggctggcagaaacggtgtgcggattcacggtcaataaagtatgtggttcgggtcttaaaagtgtggcgcttgccgcccaggccattcaggcaggtcaggcgcagagcattgtggcggggggtatggaaaatatgagtttagccccctacttactcgatgcaaaagcacgctctggttatcgtcttggagacggacaggtttatgacgtaatcctgcgcgatggcctgatgtgcgccacccatggttatcatatggggattaccgccgaaaacgtggctaaagagtacggaattacccgtgaaatgcaggatgaactggcgctacattcacagcgtaaagcggcagccgcaattgagtccggtgcttttacagccgaaatcgtcccggtaaatgttgtcactcgaaagaaaaccttcgtcttcagtcaagacgaattcccgaaagcgaattcaacggctgaagcgttaggtgcattgcgcccggccttcgataaagcaggaacagtcaccgctgggaacgcgtctggtattaacgacggtgctgccgctctggtgattatggaagaatctgcggcgctggcagcaggccttacccccctggctcgcattaaaagttatgccagcggtggcgtgccccccgcattgatgggtatggggccagtacctgccacgcaaaaagcgttacaactggcggggctgcaactggcggatattgatctcattgaggctaatgaagcatttgctgcacagttccttgccgttgggaaaaacctgggctttgattctgagaaagtgaatgtcaacggcggggccatcgcgctcgggcatcctatcggtgccagtggtgctcgtattctggtcacactattacatgccatgcaggcacgcgataaaacgctggggctggcaacactgtgcattggcggcggtcagggaattgcgatggtgattgaacggttgaattaatcaataaaaacacccgatagcgaaagttatcgggtgttttcttgaacatcgacggcgaaggtaaccccattaatcaccagtcaaaacttttcaccagcgtcagctcgccagcattacgcatcggtacaataaatgtttcctgtttctcattgaccgatccttcatcggtgatcagcgtcagttgggcggtggttaattccgtttcgctgcgcccaccatagtagttgatatacacctgatagcgcccgtgaattggcgcgggcatggcgaaaatctcgggtccgtaccccgtcgtgacatccatatccagtgcaccactgtttttcagcacggtgttaccgtaccaggcgtgttcgccatcgggcgtaacaacgtgaaggtcgaggtcggtattgtccgtatcccacgagagaaccagccgtaaacgtgcacgaatcgttcctgtacccggcgttgagtaaaactgcattttttgtcggctttgcccatccgggctgatgacctgcacgctgttgctgccttcagtgaaaatataagggcgtgcaaatgaaccatcggattcaattctctgcggcatactggcaccgttgaccaccagccggccctgctgaactttacccgccgcagcataattctttattttgccgcggatctgcgctgagatattttgatcatctgccatgttgacggacgacgccgggtaattgatcgattgtgaaaaactggcatcttcgccctctgccggatgccagcctgagagcggtgcatcaatctcgacttcctgcacaccttcactgtgagcgacaggcgaaagcgccaccagtaacaacggaagaaaaatctttcgcatagcattagtccattaataattgtcgggtcagcgtttcgatatagttctcatcaagcccggtgggataaccatcaaaggccaggtgcagatactcatgggttaaatccagccgatcctgaagcgtaaagaagttacgaataaacagccgtttctgctgccgatcggtataggggaaacctgagactaaacggcaaaccgcaaacacgtctggttcgttgtaccccgtctcagcttgtaatatacgccgccactgcggcatttttttcgccagccaggctttcgctttgggtaataactggcaggttgagcgtggcgctccccagcggctaagactgttgtcgggataagcaaacgcgagtatctgatcgtaacgctctccctgccccgcctgggccgtggcttgccgccaggaaagtgtcccttcggtagcgcgactgccatgataatgaaccggatcgcctgcatagatgagatcctgcgtccaggcggtcatcgttcgcgcccccgtggtcgctggcgaagcagaaacacgctgcgtggcgctgctgtcggggatggtcaggcaatcgccttcccgattggcgttttgctgtaaaaaagtgcgaatcgccacggtcatggctttcgctgcctcagggggcgtacttttcgcctcgcgatccagaactctggcaacgtactcttcacgatcgagatgcgactgcaatttcagtttgcccttttcgctcagtaaggtcgtctcaccgtggctgacaaacgtaatgtggttaccattagtaaacgtcacacgatagcgcccattaagtacgccgggatttactgccgtcgtactcttttccgctgtgattttcttcagcggatagcgggcaaacagctccacctctacacattgcccactggcaacctgcgtcggcactggcaaaacccgattaagcaccgtcgcataacgggttagtaccgttttgctggtgccactgccagtaacccacagcggtgtaccatcggttaaccagccagcaaaaccaccctgacggatttcctgtttatcatcggcaaaccagctccaggttttcacccgtacccgactaccgagcatggatgcgacaccgattttcgcctcgtccagcaccacatccagtaagacttcctgagctttgttttgcgcgggtaacgtcgctaatgaatcaagcagcgatttaaccgttaccgaggtttctggcttcagcgtagtcagagacgctaaccacgcaggtgcctgacgctgttgccagtattgcccccacacatctgcgccaatatgcaaccgctgcggcgcaaaatagagcccacaggaacgtaccagcgcggtatcgcgcgttatgctctccccagcctgacaacaataaacctcttccggggagtttccgcgacactggtagggctgctccggttgatgggtatcctccagccaggcgtaaacatacagtttccacaaactccctaacggcgtggtgagcgagtcaggtaatgctgagactttggtcacgcctgatgacgacagctgatacagttgatcgtgctgcgcaccgcgcagcaccagttgtaacggcgtctcctccgcaagtgttggcagagtaaccaacgccaatagccagacgattctgcgccagttcacttatttcacctgcatcccggtccattcactccctgccgcaacactttgctgcgcaggtgcataggaacgcacataacgagcaggaggcagaacgaattgccctttttgcgagaagcgcagcaaatggcggaaagtgaccgttcccgtcagttctttcaccggcaccatataggccagttcgcccatttcatttcgcgctttttccagcaattgcccctgctgtttcgcggcgttgggtttattgaccgaaatgccccatgttgtgcgctcaacgtcggctcccggtggcagcggtacttccacctgaccgtagcgcagaactgcatcctgctcgctggtaagcgtgatttcatcgagatacagcgcatcgctgtcaatctcattgctggtcaccggttgcagaataaagctcatctcttcttcaccagggataagccgatacaactggcgttcaacggtcaccggaatgttactttgttgagccatttttgccggctcacgtcagcggacctgcacattttgcggcgataattcgtcaccaaaagagagaatgtccggcacgccctgaccaacccaacgccagtcttcgccccctccagttaacttatgtttagcccatgcgcccgcaggcgcaggcaaaacaactggaggcattgtcgccatatatttcgccagccagttcatggccagcgcgcgctcaatagtggattgctcagcggtcaaaccacttaaaatagcggccgtctgggtagcgtcgccaccgctattaagcagcacaaccgtgtgcgccagcggctgattgctgtttgccgctttatcccacgcatattgctgaacctgtggcatcaccgtggacttcaactgcgcttttttcagcaacgtcatggttaagacgtttgccaccgcatctgccagtggagactccggtgtatcgaggatcaggctatcattgatatcgcgggtgtcttcctcagagaaatcttcagttttagttccgcgccgggcgatagcttcatccaaccctttcaacaacgttttgcacggcaaattcatctcctgcgcccatgccagcaccagcgcccgatgcaataacggcatgttatctgcctgctccgcgtagctgtcgagcatatgctgccagtattccggttgttgcgttacgccgatcgcctggctggcctgccagtcggcgtaccatgcccatgccgtaaggaaggcgtcaccattgccatcttcaccccaccaggtaaagcgcgctccgggccccgccagttgcatcagccgcagacggttatcctgaatcatctgacgaatgtcgttagcggcggcactttgatgatcggcaagcgaacgccaggcgagactgagcgggatcagacggctaccggtgttgattacgccaccccacggttcatcgactaacgcatcaagattgttgcggaaaatctcctgcggcgtttcactactttgtagccggatattgctcgcctgctcgggcaacatcagcgcgttatcgccaccaccgagcatgacatttttctgctgttcaacgggccagctgttatccacaaaagacagttttgtgctaatgctgtcctgcacttgcccattttgttgcagttctgcacttaacaagccagattgctgaatattctgcgtcagcgaaatataattcgcccctttgtgcagcgtcagcgtctggcgcatctcagcgcctgcaaatttagtcaccagcgccaccggttcgttatcctgctgactgaagataaacagtcctgccgccggtttgtcgcccacgcgatacaccgttggcatactccacttcatgtagagatttttttccgaacgcagataagcacgcccctgcccgaccagcccgtcgccgttcatcccacgcgcggtgatacgccagcgggttaacgaatcaggcatcaggaacgtgaaatacgctttgccttgtttatcggttgtgagtgacggcatccatgccgcggtatccacctcttcacgccgtggacgttcaagcatttttactcgccgctcgctgcggttagttgcgccaggcgcaaccggctcgctggagagcgcctggtcgtagctgataaacgacagactggagctggtacgcacattgttacgccccagcggatagaaaaatttgccgatattcggcgcgatttctggttgcagcgcgtagatcatttcatcgaccacgcctaccgttagctgcgcagaaacaggtttacctttcagcgacgaggttaattcgacattgaccagttcaccaggctggtaatgggttttgtccgttttcacccggatatccagctggggaacggcaactttgatcccggcgttctgaaaactgtactgaccgttacgggtatacagcaccgaaaaagtgatgttaggcgcaaaggaattgctcactggaacccgggcttcatactgggtatcgtttaaacgttgtagcgttagccagtttgccggatgcgaaagcagcgactgctgttccacgcgatcgcgttccagcgtcaataatgcttcatcaattggctccggaaaggtaatcagcatcttcgcggtttcgcctggctggtacagcgttttatccgccacgatatctaccgtaccagtatgcgccgtgctgcccttaccgctgacggcatgacttaacccagcgagaattaagccgtctttatcgcgtaatgtcagattgtagttgccaggtttagcgaaattgacggtaaaggatttgccgcctgacggtagctctccgctatggctcgtgcggtcttcgagacgcaaccattcatacgtaacaggaacctgttttgaagattccagcgcggcataacggaacacaaccgactcgccgctattactgtattgtgcggcagtacttaatgagtaatgcgccagaccgcgttcaatgaggatctctttggtggtggtgacgcgatacgccgcgccgtcactggcggagacggttaacaaatagcggctcggtttatcggcggcggggagatttaacgccacatgaccgctggcgtcggacaccgtttcgctgccttccagcgacacggggaaacgtccggcataacgcaaatcgttaccgaccattgataattgctgagcgcgcaaacttaactgcacgcgggcattttttaccggctcgccatccgggtagagcagttgcagtttgccgctgaccgcttcgccagttttgaactcttttttggcgagagctaaaccaatctcgaaatgtggcttgatgtagtttgccacgcgaaaactgctgctatagacctgattgcggtaagcaagacgtaactcataacctccggctacggcattttctggcaggcggaaacttccctgcccgccattgcgcgcatccagcgtgacattgacggtttgcaacagactgccgttggcgtccagcaccgaaagcttcgccggggcgctgacgatgggggatgaatgcaacggatcgtggaactcgcggccgatcactttaacatcgacacgatcgcctgcgcgatatagcgggcgatcggtaaaaatatacaagcgggtgttgtagatttcgctttcgtagaagaagttctcggagacaaaaacgccgccttcagcatccttacccagaatgtatgaacgttctggcgatatatgttgtaactgcaaggtaccgctgtcatcggtcacaccgcgggtcatcacgccaagaccgtcagtccacaagatctctgagccgggcttcgcttcaccctgttttttacccgcggtccacaccagaagctctttgcctgacactttgctaagcgccacggtatcggaaacaaacaccaccgtcgtcgcccgatacccaccaaccatcgcctcgacgaggtacagtcccggctcttgttggccgagaggaatataaatgttacccggctgcggcgagatgaaattgctggatgcgccttccagttttaccccttgctgcggctcgaacggtttagcctgccatagtggataacggaactgtttcaccaggggatattttttcagcggggaaaactggttgttctgtacataacgggaaggtttaataatggcattgccgagctgtaattcgggtaacgcctgagtcacattctgccgtgactgagaagagaaagtacgctgcatcacgcggcgagatttgccgtaccagttatcccacagccaggttagcgtattgttcagcccgtcgcccagatattgcggttgcaccacaatgcgatgcaggtttttctgctggcgcaaaaatgccatcgggtcaggaatacgatacaggcgaacgtccacgccgccgtactcttccatctgatagcgccgataatcacgccccggcgcttccagtcgcactttcgcctcttcactgctgctaaaactgctgtcagcaagcaaaaagaatgttcccccggcaggcggcgcatagttgctggaaggaagcgaatcatcagcattagcaagccctgttcccacaagagacagggacaagcacgctgctatcgcgccagaaaatttaaacgataaatgccaatgaaattgggattggaatcgttgggtatccatcgggtgtccttccatgtcataagttgttgcagactgactgcgcgcattccgttgtcagttttcgtggcgcttccggtgtggtagatgacgtaacgccccatccagaccattaagtgctgggcatcgccctgatcgaaaaaaatcatatcgccaggcagcgcctggtttatgtcctggccaataaactggctgttgtactgaatcaaattaatcgcggtcacataggggccggttttcccgttcccctgattccagttttgcgccagttgacgctgttcaggtgttagcgtcatctctggcggcaaatactggctagataaaccgttactttttagccatttactgtcgtgaactttcagcgtctcgttcgccgcaaatcgcaccaggcccgcacaatcctgctgataccagcgtggacttggcccctggcggagctgttcttgtgcaatgcgtacaaaccaggcgcgaaacagcccggattgttcgacattcagcatttcgctatgggcaacaacacaacacagccagcaaatcagcgccagcagcccgtgcctcatagcggctgccaggttatgggtagccactgccaggcggcaccgggttccatctgggccagcttcatgacataacgcggttgttgagataaagcgtccagcttcggcattaataaagtttgtgcggcgttataaaaaaccggttcgagattcttcggcagactggtcaacgtttcgttacgcagcagtttcgctattccttgtggattgatatagagcggaacgatgccatcagtgggtattacatccaccattgccgggcgggttttattcagtgtttgcagcgcgttattaaccagcgtgtcatcgagggagaaaagcagcgttttgttttgcatcgccagcgacacacggaaaaaataatccgacattaattgatcgggttgcgccgcctgcgctttcggatactggccgtatcgggaactcacttcgcgacgccagatttgcgcttcgccctgctgagtctggcttaccggcaaaacaccttctggcgctttgctttcgtgcgcaccaatattttgcgtaaacagtttccctggcaattgcgcctgttcggcagtgccatcaaactgaccgacaaacagcggggtttgcaattttgagtcttcataccagcacagccccgcggcaccgtctaacgccccattcagcttgtcgttttcctggctgatgtgcgaaagcatctcttcggcaataccgtgtgaatacggcaccgccacacagaagctggctccggcaggcatactgttccataccggcgtaaaatcgaaactggcatctacgctggcggattcatcatttaacgccacaaaactgtgccagccgtcgttacccatttcgaagcgtacgccagcaaaagaaggcattaaccgctggtagccaaaccccagccacctggcgctgactacgatgcgctggcgtactggcgttttttcggcagtacgctcttccaggccaaagcttgcttgccagcgttttttgccgctcaacaaatcacctgcgatcgccgtggcttcggtatcctgctgatcatctttaaacaacatatccgtgctggaaaacaccagcatcttgtcctgataagtcgcgaacatcagggcgttattgccgttatagcgcaactgataaacaggaacagtttcactatttatcttgatgctactgatttccgttttgcttaactggctgtcgctggtagcggcaaacaacaatggctccagcagtttgcttaaaccactgcgctggatcagcaccatataatgtgaaagatggccttgtttatcgtgccacagcgctgcctgcgcgggctgatctaagagtgacgaaaagagcttatctttcagcgtgagatcgtgttcatagacaatacgacgaatgctgccttcaatgcccagacgatcggcatgattctgataatagaaaacgaaatcttcgctcagaacatcgtggagaaacggaatggtgaggagatctttgggaagctggctcagagagtcgctgtcgagaaagaggtccggctcattgagatcgatttgcagattgttgtgcaccaccagcggcgacaacgttttttctggcccactgccagcatattgcaacgcccagacgccagcggaaagcagtgctattgcgccaaaacctacaagaccatagaaccgccagcctttcgcctttttttcaccactcattgccacattccttgtgtatagccagccattttttacgggcacagccaaactttaccgtgccctaatacgacaaaagcccagactttgcagcctggacttttcaattcaaacaagggagatagctcccttttggcatgaagaagtaaaattattcttcttctggctcgtcgtcaacgtccacttccggagcgatttcatcgtccccttccgcggcactgccgtcgatggtatccagatcttcctcgtcaaccggttcagcaacacgttgcagacccactacgttttcatcttccgcagtacggatgaggatcacgccctgggtgttacggcccacgatgctgatttccgaaacgcgagtacgtaccagcgtaccggcatcggtgatcatcatgatctggtcgcagtcatctacctgtaccgcgccaacaactaaaccgttacgttcggtaaccttgatggagataacccctttcgtcgcacgcgacttggttgggtattccgccactgcggtacgtttaccgtaaccgttttgcgttgcggtgaggattgcgccatcgccacgaggcacgatcagagagacgactttatcgccttcacctaagcgaataccgcgaacaccggtggtgttgcagcccatcgcacggacagaagactctttaaagcgcaccactttaccttcagcggagaacagcattacttcgtcttcgccgctggtcaggtcaacgccgatcagctcatcgccgtcaaccagtttgatcgccactttaccggcggtacgcagacggttgaactcggtgaggacagttttcttcacggtaccgttagcggtcgccatgaagactttcacgccttcttcaaactcggtcactggcaggatcgcagtgatacgttcgtcctgctccagcggcagcaggttgacgatcggacgaccgcgcgcgccacgagtggcttccggcaactgataaactttcatcgaatagacgcgaccacggctggagaagcacagaatatggtcgtgagtgttcgccaccagcagtcggtcgataaagtcttcttctttaatacgtgcggcagatttacctttcccgccacgacgctgcgcttcgtattcagaaagcggctgatacttaacgtagccctggtgagagagcgtcacgaccacatcttcctgggtgatcagatcttccaggttgatgtctgcgctgttggcggtgatttcagtacgacgtttgtcaccgaactgttcacgaaccagctccagctcttcacggatcacttccatcagacgatcggcgctaccaagaatacgcaacagttccgcgatctgatccagcagctctttgtattcgtcgagcagtttttcgtgctcaagaccggtcagtttctgcaaacgcagatccagaatcgcctgagcttgctgttcggtcaggtagtacagaccatcacgcacgccgaactctggctccagccattccggacgcgcagcatcgtcgccagcacgttcgagcatcgcggcaacgttgcccagctgccacggattagcaaccagcgcagttttcgcttctgcaggcgtcggcgcatgacggatcagttcgatgatcgggtcgatgttcgccagcgccacggctaatgcttcaaggatatgagcacgatcgcgagctttacgcagttcgaaaatagtacgacgggtcaccacttcacggcggtgacgaacaaacgccgcgatgatgtctttcaggttcatgatcttcggctgaccatggtgcaatgccaccatgttgataccgaaagaaacctgcaactgggtctgggagtagaggttgttgagcacaacttcaccgaccgcatcgcgtttcacttcaatcacgatgcgcataccgtctttgtcagactcgtcacgcagcgcgctgatgccttccacgcgtttttcttttaccagttccgcaatcttctcgatcaggcgcgctttgtttacctgatacggaatttcgtggacgataatggtttcacgaccggttttggcgtcaacttccacttctgcgcgagcgcggatatacaccttgccgcgaccggtacggtaagcttcttcaataccgcgacgaccgttaatgattgccgccgtcgggaagtccggccccgggatgtgttccatcagcccttcaatgctgatgtcttcatcatcaatatacgccagacaaccgttgatgacttccgtcaggttgtgcggcgggatgttggttgccatacctacggcgataccggaagaaccgttcaccagcaggttaggaattttggttggcatgacgtccggaattttttccgtgccgtcatagttatcaacgaaatcgaccgtctctttttcgagatcggccatcagttcatgggcaattttcgccagacggatttccgtataacgcattgccgccgcagagtcgccgtcgatagaaccgaagttaccctgaccgtctaccagcatataacgcagcgagaatggctgcgccatgcggacgatcgtgtcatagaccgccgagtcaccatggggatggtatttaccgattacgtcaccaacgacacgggcagattttttataggctttgttccagtcattgcctagtacgttcatggcgtaaagtacgcgacggtgtaccggcttcaggccatctcggacatctggcagcgcacggccaacaatgaccgacatcgcataatccagataggagctcttcagctcttcctcaatgttgaccggtgtaatttctctcgcaaggtcgctcatctaaccgctatccctctactgtatcccggattcaaaggtcgcaaattataacacagccgcgcagtttgaggtaaacctatacgctttattcacatccaatgcctgatatactcgtttgtcttgccaattacggagtagaagtgccaatgaatgccgaaaaatcgccggtaaaccataacgtagaccacgaagagatcgctaaatttgaagccgtcgcctcccgctggtgggatctggaaggtgagttcaaaccgctgcaccgcattaacccgctgcgtctgggctatattgccgagcgtgctggcggtttatttggcaaaaaggtgctcgatgtcggttgtggcggcggcattctggccgagagtatggcgcgcgaaggcgcgacggtgaccggtctggatatgggctttgagccattgcaggtggcaaaactgcacgcactggaaagcggcattcaggtggattacgtgcaggaaaccgtggaagagcacgcggcaaaacatgccgggcagtatgatgtggtgacctgcatggagatgctggagcacgtccccgatccgcagtcagtggtcagagcctgtgcgcaactggtgaaaccaggcggcgatgtctttttctcgacacttaaccgcaacggcaagtcatggctgatggcggtggttggtgcggaatatattttgcgcatggtgcccaaaggcacgcatgatgtgaagaagtttattaaaccggcagaattgctgggctgggtggatcagaccagtttaaaagagcggcatatcactgggctgcattacaacccgatcactaatacttttaaactcggccccggcgtggatgtgaactatatgctgcacacgcagaataagtgaggttgatgtttggccgcgccaatgcctgatgcgacgcttgccgcgtcttatcaggcctacaaatgctccccgtaggccggataaggcgtttacgccgcatccggcaaccgtgccgactagacagtgattaccatttcaccgtcatcgacaaaaaccctgccgtctgggcaaaatcatcactccctttctgccacgccacgctgccgcgcagggacactcgctgactgatattgcccgtgactcccacttttatttcaccccgttgcttcaccgcatcgtcactgatagtgctgccatcctcttcaatttccgtcgaatggggatcgtgataataattcagatctaatgttggtatgacatgaacagcggtacgccattcgctgtgtaaacccagccgcgtctgaatatcatcaccctgcgattgtgacacgcgcgcacggttagcggcggtaaaatcatcctgctgcacgccctgataaatcacctgcgcctgcggttcaatcaccacaccacgccccggtaaccactgataccccgcctccagcgaggcgataatccccgacgagtggtaatgatctgtgccatcttcttgttcggaaacatcattgctaaaccacgcgtattgcagccagctatccagccaggccccttgcttctgattaccgtgctgaaaccagcttgatgtcagcccaacggcataaccgtggttctggttatcggcgcgagttccggtcatattcgagcggctgtcgccctggttatcgctgtagccaccaacaatcccaagcatccactcgccatccgtgccccagcgcccgctaaacagatcgccgctaagttgcaccgtagaagtgtcttcatgttgagccagttgccccgctgctgtgtaatgataatctccgccgataacacgtaaattcagcgtctgaccatcgccacctgcgtgatcgcgtcgctccatcataaacgcctgatttgccgcccgcaggttattaagataaccgccaactttggcattcaacaccggctggtaagcaggcgtaggttccgggtcgggtgttggatcaggatccggcgtgggatcaggatcgggagtcgggtctggatcaggtggcgatggcggcgttacttcttgcgatcgcagataccagtcgttgttatcttccaccagcgtgtagtcatacgctcccatattgacgtagccgctgcctgccagactgaactgcgcattgttttgaaactgcgtgggatcagctgcgaaatcaaccactttaatgcctgtcgatgtcggctcaccaatccctgtaatggagttaaccaccacagttgtgttgccagcagtattaccgttcatcaccaattgatcgcttaccgagtcatcgccgtttaattcgctatcgagcagtagcgtaccgccgccggtataatcaccgtttaccgtcagcgtatcgccagcgacgccattttgcaggctaaccgcaccggacgtattggtcagattgccattaaccgtcacgttggaaagataagtcaggctgtcagtttcaaggttggtattaagctcacctgtcaacgtcacaccatcggtggcattcaccagcgtcccatcgccgttaaatagtgaggcattaagggcgacggaagtatcctgcccggtcaggcgcaaaaccgtaccatcgctgatgtcgatagtgccgctggaaatagcatcaattgactgaatatcctgatccgcgccagtaacgaacgttgccccatcaccaacccacagtgacgaagcataaggaaggatatcagcaacatcacctttcagggtgccttcttcgacacgtaccgccgactgcgttgtaccgctggcggtcagctccagtgtaccagcccccgttttagtcaatgtgctaccctcatcctgatgctgcccgctgctgtcagccatcagtgcgccccactgcgtgtctacccccgcatcaactgccacttcaccgtcggcgcgcatttcaatatcacgtccgtggcctgccgcatctgaacgcgtgtcaacgtcggaggtaatctccatcacgctttcttgttgcttatcggtaaagataacctggcggttatagtgggtatctccaagctgcgagttgtcgctcaccatcagcgtaccggaggcgatttgtgttgtgcccaaataactattattgtttgccagacttacctgcccgtcgctcgcatcgaccaccacgtagacgccatctttcccgtcgccgccgatatgcaaattgtcgccacctgcaagatctaccacatcctgactgccgataaccgttccgctgctgccactgacttcaaggccatcgttgtatgatgtgccgctctgccaggtggagaaatcagagagatcgagcacaccgccgtttaacacgatcgactgcggatcgtcctggagagcggtaagatctgccgcgtcgccttccagcgaaagcaccgcaccatcatcaacgactatatcgccggttagcgccatcgactgcgcccctgccagcacgtagctgccgttttgcgcaatggtgagctgaccagcaccttcgatgatgccagcaaaactgccctgattaacagtaacgttgccaccagcatcgatatttaaagtgccattctgaaagcccgtcaatgcgtgcacaaaagtttgttgggtcgagccaacgtttagctcagcctgattctgatactgatcaatactccctatcgtcagaccgtagcagtcttgcggatcgtcctggcaatgcgtatcgccgacattcatcagggagttgctgcggcccagggtaacttcaccgttttcaatctgcatctcaccagtaaagtcattgttatctgcattaagtaccagatcgccggaacctgttttggtgattaacccggtaccagcaatagagtcaacagctccgtcattctctgtattgccaataaccagcgtttttccgtcggcaatatcaaaggtaacttcacttaagccgagatacataaagccacccgccgcagaggaaggaccatctccatagcctgctgcgctattgttctcatcgactaacacgcctccgttctggctgtagctgtcatcaacagaaatatcaataagatagggagccgtcacgctattggtatatatcgccccgccataaccttcggcagtgttatttgtaaaggcagtgttatttactatcgtataacctgaaggatgcttgctgtcgctattattatcggtaacatcgattgccccgccatcgccatcactgtaacttgttgatgtatatgcctggttgttatcaaaaataacatcacttaaataaacgtcattattaatggtataaattgcgccacctttgccatcattagcgatgttattgcgaaacatggcgttagtgacacgtaaatcgacggcaccagtatcgttagtaccagaagaatagattgcgccaccatagccgcctgcgacgttaccggaaaaaataacatcagtaagattcagcgttgagttttctttagcaaatatggccccgccgttattatattctcctgtaacggtgttattggcaaacagagtcattccagtttcattttctggtaatagtgaaaattccgctccttgttgcaaaaatacggccccaccgctggcgttattggtcatatccgaaaaaaccagccattgcccatcagcgatactccagtcctgcgtaatgcctgaaaggctttgcctgctggcctgacaactcgctttgacatcatatccctggcatgaatcagtgaccgccgcgacaccgttagcagagaaaagagatgcaatcattgacgggagtaaagataaatactccttgcgtagaaagataatccgcatattaatctaaccatcattttctataagacggcgtatttaatcgcattatacgatatggaatatctttcttttgtaaattgttcaacccggtgcaatggctattttgttattatttgatgaataatatcagtgcgtcataattcaagttaataaccttcagggatatcagttatatttaaactaaattaaagtcatgaataattttcttataatataaggtaaattaacaaaatggcttagcatttaacaataaccgaatagaaaacaaccatttcgccatcaacaatctcttacattcgcttatatattgaccacaactgatacatcagattatgtgatgactcgtgcttagatcaatttttgcaatcattagcaaaaagattaataagccatctatatcaatttatctaacctattatgccgttcaagaaatcgccgaacagttatttttaacaaatttttctcttcccattgactttcccggacaccttgtctgacctaaggtgcgcgaaagccactttttccttcctgagttatccacaaagttatgcacttgcaagagggtcattttcacactatcttgcagtgaatcccaaacataccccctatatatagtgttctaagcagcttcccgtactacaggtagtctgcatgaaactattgcggaaagaattccaaaaacaggtacgacatacatgaatcagaatctgctggtgacaaagcgcgacggtagcacagagcgcatcaatctcgacaaaatccatcgcgttctggattgggcggcagaaggactgcataacgtttcgatttcccaggtcgagctgcgctcccacattcagttttatgacggtatcaagacctctgacatccacgaaaccattatcaaggctgccgcagacctgatctcccgtgatgcgccggattatcagtatctcgccgcgcgcctggcgatcttccacctgcgtaaaaaagcctacggccagtttgagccgcctgcgctgtacgaccacgtggtgaaaatggtcgagatgggcaaatacgataatcatctgctggaagactacacggaagaagagttcaagcagatggacacctttatcgatcacgaccgtgatatgaccttctcttatgctgccgttaagcagctggaaggcaaatatctggtacagaaccgcgtgaccggcgaaatctatgagagcgcccagttcctttatattctagttgccgcgtgcttgttctcgaactacccgcgtgaaacgcgcctgcaatatgtgaagcgtttttacgacgcggtttccacatttaaaatttcgctgccgacgccaatcatgtccggcgtgcgtaccccgactcgtcagttcagctcctgcgtactgatcgagtgcggtgacagcctggattccatcaacgccacctccagcgcgattgttaaatacgtttcccagcgtgccgggatcggcatcaacgccgggcgtattcgtgcgctgggtagcccgattcgcggtggtgaagcgttccataccggctgcattccgttctacaaacatttccagacagcggtgaaatcctgctctcagggcggtgtgcgcggcggtgcggcaacgctgttctacccgatgtggcatctggaagtggaaagcctgctggtgttgaaaaacaaccgtggtgtggaaggcaaccgcgtgcgtcatatggactacggggtacaaatcaacaaactgatgtatacccgtctgctgaaaggtgaagatatcaccctgttcagcccgtccgacgtaccggggctgtacgacgcgttcttcgccgatcaggaagagtttgaacgtctgtataccaaatatgagaaagacgacagcatccgcaagcagcgtgtgaaagccgttgagctgttctcgctgatgatgcaggaacgtgcgtctaccggtcgtatctatattcagaacgttgaccactgcaatacccatagcccgtttgatccggccatcgcgccagtgcgtcagtctaacctgtgcctggagatagccctgccgaccaaaccgctgaacgacgtcaacgacgagaacggtgaaatcgcgctgtgtacgctgtctgctttcaacctgggcgcaattaataacctggatgaactggaagagctggcaattctggcggttcgtgcacttgacgcgctgctggattatcaggattacccgatcccggccgccaaacgtggagcgatgggtcgtcgtacgctgggtattggtgtgatcaacttcgcttactacctggcgaagcacggtaaacgctactccgacggcagcgccaacaacctgacgcataaaaccttcgaagccattcagtattacctgctgaaagcctctaatgagctggcgaaagagcaaggcgcgtgcccgtggtttaacgaaaccacttacgcgaaagggatcctgccgatcgatacctataagaaagatctggataccatcgctaatgagccgctgcattacgactgggaagctctgcgtgagtcaatcaaaacgcacggtctgcgtaactccacgctttctgctctgatgccgtccgagacttcttcgcagatctctaacgccactaacggtattgaaccgccgcgcggttacgtcagcatcaaagcgtcgaaagacggtattttgcgccaggtggtgccggactacgagcacctgcacgacgcctatgagctgctgtgggaaatgccgggtaacgatggttatctgcaactggtgggtatcatgcagaaatttatcgatcagtcgatctctgccaacaccaactacgatccgtcacgcttcccgtcaggaaaagtgccgatgcagcagttgctgaaagacctgctcaccgcctacaaattcggggtcaaaacactgtattatcagaacacccgtgacggcgctgaagacgcacaagacgatctggtgccgtcaatccaggacgatggctgcgaaagcggcgcatgtaagatctgatattgagatgccggatgcggcgtaaacgccttatccggcctacggctcggtttgtaggcctgataagacgcgccagcgtcgcatcaggctccgggtgccggatgcagcgtgaacgccttatccggcctacggctcggatttgtaggcctgataagacgcgccagcgtcgcatcaggcacaggatgcggcgtaaaatgccttatccggcattaaactcccaacaggacacactcatggcatataccaccttttcacagacgaaaaatgatcagctcaaagaaccgatgttctttggtcagccggtcaacgtggctcgctacgatcagcaaaaatatgacatcttcgaaaagctgatcgaaaagcagctctctttcttctggcgtccggaagaagttgacgtctcccgcgaccgtatagattaccaggcgctgccggagcacgaaaaacacatctttatcagcaacctgaaatatcagacgctgctggattccattcagggtcgtagcccgaacgtggcgctattgccgcttatttctattccggaactggaaacctgggtcgaaacctgggcgttctcagaaacgattcattcccgttcctatactcatatcattcgtaatatcgttaacgatccgtctgttgtgtttgacgatatcgtcaccaacgagcagatccagaaacgtgcggaagggatctccagctattacgatgagctgatcgaaatgaccagctactggcatctgctgggcgaaggtacccacaccgttaacggtaaaactgtgaccgttagcctgcgcgagctgaagaaaaaactgtatctctgcctgatgagcgttaacgcgctggaagcgattcgtttctacgtcagctttgcttgttccttcgcatttgcagaacgcgaattgatggaaggcaacgccaaaattattcgcctgattgcccgcgacgaagccctgcacctgaccggcacccagcatatgctgaatctgctgcgcagcggcgcggacgatcctgagatggcggaaattgccgaagagtgtaagcaggagtgctatgacctgtttgttcaggcagctcaacaggagaaagactgggcggattatctgttccgcgacggttcgatgattggtctgaataaagacattctctgccagtacgttgaatacatcaccaatatccgtatgcaggcagtcggtttggatctgccgttccagacgcgctccaacccgatcccgtggatcaacacttggctggtgtctgataacgtgcaggttgctccgcaggaagtggaagtcagttcttatctggtcgggcagattgactcggaagtggacaccgacgatttgagtaacttccagctctgatggcccgcgttaccctgcgcatcactggcacacaactgctgtgccaggatgaacacccttcccttctggcggcgctggaatcccacaatgtggcggttgagtaccagtgtcgcgaaggttactgcggctcctgtcgcacacgcctggttgcaggtcaagttgactggattgccgaaccgttagcctttattcagccgggggaaattttgccctgttgttgccgggcaaaaggcgatattgaaatcgagatgtgaattggttgtagtgccagatacaacgcttatgcgtcttatctggcctacaacgattacatggcgtagtaatacgctttcacctgctcccagtccgctttggggattggctccagatatttttccagctggcggaagtcatgattaatcgctttatcgcgacgcaagcggcgacgacttttctccaggtcaagaaaaccagcttctgcattaccttctgttttcacatagatatggcgaacataacaacagccatgctgacgattaatgctatgcattttcttaaacgccagcgccactgctttcaacatggcttgccgtacttcgtcagaataaggcgatactgcatgctgggcataccagtcagcaatgctgatgaaccccgccatatcttcagtcaccagcaacgctcgccattcaccctcaattttcaccgcttcaccaaaaacgatcttcggcacgatgacaccggcccgttccagttctttaattaccgcaacctcacggacaatcgttggtcggccgaacggataacgtacggaatgaaacagatgatgcgtcatgcgctttacatacagctttttgccgttgcgctcgacgcattgcaccccgctcataccattacggcgatagttaggctcttcaacccagtcgccctctgttgcccaccagtgattaaattcgtcgtactttgctgaaactgccataccctatcgcctgtcatttttattaacgacaatgactataggtggttacctgaggaaaatcttaatgaaacgtgtcgtattaatgaatttcttttgccactactagcttgacaccgcttttacccttcatttgcagcgcatagattccaccagccactaccactaatagtgcgcccagcagataaaatgtgaatttaatcaggcggatacagcgatgaattttattcgacagggattaggcatcgccttacaaccagagttaacgctgaaaagcattgcaggtgaattgtgttccgttcctctcgaaccaactttctatcgacagatttcgttgctggctaaagaaaagccggtagaaggcagtccactgtttttactacaaatgtgcatggaacaattagtggcgattggaaaaatttgatatgagacaggatggcgcatgaacgccatcctgcagtaacattactctttattaagaaattttactgccttatcagggaaatcagtaaacagcccatttacacccgctttgttatacagagcatcatataactgattcacatcaggagtgtattcaggcagtttatctgaccgcacggtataaggatgcactaccagtttattctgctgagcatcttgcaccatgccagtgagtttgatattacccggctgcgatgtctcctcaatcaacatatggtaatccggaccaataccatctgcatattccgccacctgtttcatggcacccggcttaaacatccagtcgtagttgtaattaacccagcttccatccggctgtttctgctgcgtttcattccagtcggtataggcaatcagctgtaccagattgagctccatgcccattttgggttccagctcattcttaatacgcttcagctcatcagcatcaaaacattgcaaataaactttatcgtctttaccggtgtaaccatatttcttcagcacttccagcgtttttgccgcaatatccttcccttcctgatgatggaaccacggcgctttgatttctggataaataccgatatttttcccggtagagtgatttaacccctgaacaaattcaatctcttcttcaaaggtgtgcacccggaagtcggacttacccattgggaaacgccccggataagtctgcacttttttaccgttttcaatatcgaaaccttcggtaaatttcaacgacttaatttcatccagcgtgaaatctatcgcgtagtaacgaccgtctttgcgcgcccgatccgggaaacgatcggcaacatcagtaacacgatcgaggtaatggtcatgcagaacaaccagattgtcgtctttggtcatcaccaaatcctgttccagataatccgctccctgcgcatacgccatcgcttttgctggcagcgtatgctccggcaaatatccactggcaccgcgatgggcgatgactattttttcgttgctgtccgccgccattgcactgcttcccatgactatagtgctcatcatgatcgccatgctaaggtttttcagcgtcaatttcatgccattagcctccgttgcgttcttgcagtaattgttcatggcgacgtttttcgccaatcatcacaacaatcaacaagataaccgccagaatgctgccgccaatcattaccataaagccgccatcccagccgaagaagtccacggtgtagccaacaatcgcgctcgccgccaccgaaccgcccaggtaaccaaacagcccggtaaagcccgctgccgtacctgccgcttttttcggtgccagttccagcgcatgcagaccgatcagcatcacaggaccgtagatcaggaagccgataacaatcatacaaatcatatcgacggttgggttacctgccgggttcatccagtaaacgatagtcgcgatggtcaccagtgtcataaagaaaacgccggttgccccacggttgccacggaagactttatccgacatccagccgcacagcagagtgcccggaatacctgcatattcataaaggaagtaggcccaggaggatttatctagcgcgaaatgcttaacctctttcagataagtcggtgaccagtcgaggatgccgtaacgcagcagataaacgaacacgttggcgatggcgatataccacagcagtttgttcggcagtacgtactgcatgaagatttgcttcgccgtcagctcctgttccgctttttcgttatagtcgtccggataatcatttttgtactcttcgatcggcggcaagccacaggattgcggggtatcgcgcatcatcgcaaaggcgaataatgccaccagaatggcgcagaaagcaggcatatagagcgccgcatgccagtcattgaaccaggccatccccagcaggaacagcagcggcggaataccaccaccgacgttgtgcgcacagttccacactgacacaatgccgccacgttctttctgcgaccaccagtgcaccatagtacgaccacacggcggccaccccatcccctggaaccaaccgcagaggaacaacagtacaaacatcaccgcaatgctcgacgtcgcccatggcacaaagcccataaacaacatcactgccgccgccagaatcaaacctgcgggcaggaaaacgcgcggattcgagcgatccgataccgaacccatgatgaatttcgaaaatccataagcaatcgagatccccgaaagggcaaaacctaaatcaccgcgtgagaatccctgctcaaccagataaggcatagcaagcgcaaagttcttacgaaccaaatagtaagccgcatagccaaagaatatccccaggaaaatttgccagcgcaatcgacgataagtcggatcgatctccgcggcaggtaagcgcgctttgtgtggcgctggtttaaaaatactcaacattgatagcctccgtggcccgtggtcttatttatgattaacagcctgattcagtgagagaacctgccgtttcttgagttgccgcgatgttaagaaaacattcataaattaaatgtgaattgccgcacacattattaaataagatttacaaaatgttcaaaatgacgcatgaaatcacgtttcactttcgaattatgagcgaatatgcgcgaaatcaaacaattcatgtttttactatggctaaatggtaaaaaacgaacttcagagggataacaatgaaaactcgcgactcgcaatcaagtgacgtgattatcattggcggcggcgcaacgggagccgggattgcccgcgactgtgccctgcgcgggctgcgcgtgattttggttgagcgccacgacatcgcaaccggtgccaccgggcgtaaccacggcctgctgcacagcggtgcgcgctatgcggtaaccgatgcggaatcggcccgcgaatgcattagtgaaaaccagatcctgaaacgcattgcacgtcactgcgttgaaccaaccaacggcctgtttatcaccctgccggaagatgacctctccttccaggccacttttattcgcgcctgcgaagaagcagggatcagcgcagaagctatagacccgcagcaagcgcgcattatcgaacctgccgttaacccggcactgattggcgcggtgaaagttccggatggcaccgttgatccatttcgtctgaccgcagcaaacatgctggatgccaaagaacacggtgccgttatccttaccgctcatgaagtcacggggctgattcgtgaaggcgcgacggtgtgcggtgttcgtgtacgtaaccatctcaccggcgaaactcaggcccttcatgcacctgtcgtggttaatgccgctgggatctgggggcaacacattgccgaatatgccgatctgcgcattcgcatgttcccggcgaaaggatcgctgctgatcatggatcaccgcattaaccagcatgtgatcaaccgctgccgtaaaccttccgacgccgatattctggtgcctggcgataccatttcgctgattggtaccacctctttacgtattgattacaacgagattgacgataatcgagtgacggcagaagaggttgatattctgctgcgtgaaggggaaaaactggcccccgtgatggcgaaaacgcgcattttgcgggcctattctggcgtgcgcccgctggttgccagcgatgacgacccgagcggacgtaacgtcagccgtggcatcgtgctgctcgaccatgctgaacgcgatggtctggacggatttatcaccatcaccggtggcaaactgatgacctatcggctgatggctgaatgggctaccgacgcggtatgccgcaaactgggcaacacgcgcccctgtacgactgccgatctggcactgcctggttcacaagaacccgctgaagttaccttgcgtaaagtcatctccctgcctgccccgctgcgcggttctgcggtttatcgtcatggcgatcgcacgcctgcctggctgagcgaaggccgtctgcaccgtagcctggtatgtgagtgcgaagcggtaactgcgggtgaagtgcagtacgcggtagaaaatttaaacgttaatagcctgctggatttacgccgtcgtacccgtgtggggatgggcacctgccagggcgaactctgcgcctgccgcgctgccggactgctgcaacgttttaacgtcacgacgtccgcgcaatctatcgagcaactttccaccttccttaacgaacgctggaaaggcgtgcaacccatcgcctggggagatgcactgcgcgaaagcgaatttacccgctgggtttatcagggattgtgtggtctggagaaggagcagaaagatgcgctttgatactgtcattatgggcggcggcctcgccggattactctgtggcctgcaactgcaaaaacacggcctgcgctgtgccattgtcactcgtggtcaaagcgcactgcatttctcatccggatcgctggatttgctgagccatctgccagatggtcaaccggtgacagacattcacagtggactggaatctttgcgtcagcaggcaccagcccatccttactcccttctcgagccacaacgcgtgctcgatctcgcttgccaggcgcaggcattaatcgctgaaagcggtgcgcaattgcagggcagcgtagaacttgctcaccagcgggttacgccgctcggcactctgcgctctacctggctaagttcgccagaagtccccgtctggccgctgcccgcgaagaaaatatgtgtagtgggaattagcggcctgatggattttcaggcgcaccttgcggcagcttcgttgcgtgaactcggccttgccgttgaaaccgcagaaatagagctgccggaactggatgtgctgcgcaataacgccaccgaatttcgcgcggtgaatatcgcccgtttccttgataatgaagaaaactggccgctgttacttgatgcgcttattcctgtcgccaatacctgcgaaatgatcctgatgcccgcctgcttcggtctggccgatgacaaactgtggcgttggttgaatgaaaaactaccttgttcactgatgcttttgccaacgctgccgccttccgtgctgggcattcgtctgcaaaaccagttacagcgccagtttgtgcgccagggtggcgtgtggatgccgggcgatgaagtgaaaaaagtgacctgtaaaaatggcgtagtgaacgaaatctggacccgcaatcacgccgatattccgctacgtccacgtttcgcggttctcgccagcggcagtttctttagtggcggactggtagcggaacgtaacggcattcgagagccgattctcggccttgatgtgctacaaaccgccacgcggggtgaatggtataagggagatttttttgcgccgcaaccgtggcagcagttcggtgtaaccactgatgagacgctacgcccgtcacaggcagggcaaaccattgaaaacctgtttgccatcggttcggtgctgggcggatttgatcccatcgcccagggatgcggcggcggtgtttgtgccgtcagtgctttacatgccgctcaacagattgcccaacgcgcaggaggccaacaatgaatgacaccagcttcgaaaactgcattaagtgcaccgtctgcaccaccgcctgcccggtgagccgggtgaatcccggttatccagggccaaaacaagccgggccggatggcgagcgtctgcgtttgaaagatggcgcactgtatgacgaggcgctgaaatattgcatcaactgcaaacgttgtgaagtcgcctgcccgtccgatgtgaagattggcgatattatccagcgcgcgcgggcgaaatatgacaccacgcgcccgtcgctgcgtaattttgtgttgagtcataccgacctgatgggtagcgtttccacgccgttcgcaccaatcgtcaacaccgctacctcgctgaaaccggtgcggcagctgcttgatgcggcgttaaaaatcgatcatcgccgcacgctaccgaaatactccttcggcacgttccgtcgctggtatcgcagcgtggcggctcagcaagcacaatataaagaccaggtcgctttctttcacggctgcttcgttaactacaaccatccgcagttaggtaaagatttaattaaagtgctcaacgcaatgggtaccggtgtacaactgctcagcaaagaaaaatgctgcggcgtaccgctaatcgccaacggctttaccgataaagcacgcaaacaggcaattacgaatgtagagtcgatccgcgaagctgtgggagtaaaaggcattccggtgattgccacctcctcaacctgtacatttgccctgcgcgacgaatacccggaagtgctgaatgtcgacaacaaaggcttgcgcgatcatatcgaactggcaacccgctggctgtggcgcaagctggacgaaggcaaaacgttaccgctgaaaccgctgccgctgaaagtggtttatcacactccgtgccatatggaaaaaatgggctggacgctctacaccctggagctgttgcgtaacatcccggggcttgagttaacggtgctggattcccagtgctgcggtattgcgggtacttacggtttcaaaaaagagaactaccccacctcacaagccatcggcgcaccactgttccgccagatagaagaaagcggcgcagatctggtggtcaccgactgcgaaacctgtaaatggcagattgagatgtccacaagtcttcgctgcgaacatccgattacgctactggcccaggcgctggcttaaactcctttctgatgcccggtaagcatgtggttaccgggcatttttgcgtacacgattccgtgcccaatgtatgcgttgcaacgcagtgaaaattcctctgaaaacgtctcgcaaaggctgaaactggcagatgtcaaaggcctgggataaccgtaatgtcgcgtcatcataaatatcaggtgacggacaaccatgaccgaatcaacaacctcctccccgcatgatgcggtatttaaaacctttatgttcacacccgaaaccgcacgggattttctcgaaatacatttaccagaaccactgcgcaagctttgcaacctgcaaaccttacgcctggaacccactagttttattgaaaaaagtttacgcgcttactactcggatgttttgtggtccgtggaaaccagcgacggtgacggctatatctactgcgtgattgaacatcaaagctctgcagaaaagaatatggcttttcggctaatgcgctatgccactgccgccatgcagcgtcaccaggacaaaggctatgacagagtcccgctggtggtgccgttgctgttttatcatggcgaaacctcgccttacccgtactcactcaactggctggatgagtttgacgatccgcaacttgcccggcagttgtacaccgaagcttttctgttggtggatatcaccatcgtacctgacgatgagatcatgcaacatcggcgtatagctctgctggaactgattcaaaagcatattcgcgaccgcgatttaatcggcatggtcgacaggatcaccacgcttttggttagaggcttcactaatgacagccagctacaaacactgtttaattatctgctgcaatgcggcgatacctcccgtttcacccgttttattgaggagattgccgaacgttcaccactacaaaaggagagattaatgactattgctgaacggctacggcaggaagggcatcaaattggctggcaggaaggtatgcatgaacaagccattaaaattgctttgcgcatgctggagcagggctttgaacgtgagattgtgctggcgacaacccaactcactgatgctgatattccgaactgtcattaaaaggagagattaatgactattgctgaacggctgcggcaggaaggacatcaaattggctggcaggaaggtaaattagaaggtttgcatgaacaagccattaaaattgctttgcgcatgctggaacagggctttgatcgtgaccaggtgctcgcggccacccagctaagcgaagccgatctggcagcgaataaccactaattaacacaggcccacagccgatccccatgggcctttgatatcaataactaccttttatgcgtggcccatttttgcctgatttaaacatcgccagtcgttgatccagggcatcgctgtagagcatcgtgtcaacgccaacagcgacaaagttcgctccccacgccaggcattgctgcgccatatcaggagccacagccagaaaaccagccgctttacccgcagcacggatccgccgaatactggtttcaataattcgctgcacttccgggtgcccggcgttatccgggtagcccaacgacgcagaaagatccgcaggtccaataaacacgccatcaatcccttcgacgtcgaggatttcgtccaggttatccagtgccgttttactttccacctgcaccaacagacaaagcgaatcgttaacttgcgccatgtaattctcaatgcgtccccagcgcgcagcccgtgccacactggccccgacaccacgctcaccgtagggaggatagcgcgtggcagacaccacctgacgtgcctgttcggcagtatcgaccatcgggatcagtagagtttgcgcgccaatatccaggacttgtttaatcagcggtttactgccttccaccggacggatcacgggttggctggcatagggcgctaccgcctgtagctgatgataaagatcctgaatggtgtttggcgcgtgctccccgtcaatcagcaaccagtcataaccagaagtggcggcaatttctgccatataggcagtcgttgagcttaaccacagaccaatttgcacttcgcccttgcgtaaacgttctttaaagggattgcttaataatgcgttcatcgtgttccttaacctatttaatgatgtgccacgtcggtctgcgcaacagtgcgatttacacgcagagtgaaaataatcagcgaaccgatgaccgccaccgctgccagcgtcagtaatcccgccgcatcgctggcaaataacgtttctgctttcacgcgcaggatcggggcaataaacccgcccactgcaccaaacaggtttacaaaaccaattcccgcagccagcgccgtaccggaaagcagttgtgtcggcatcgtccagaacactggctgcacggcaataaacccgatagctgcaacacacagcgctacgatcgccattactggagaaagcagcccggacagaccaataccaatgcccgccgccagtaatgtcagcgctgcgacattacgccgttcgccggttttatcggaatagcgcggaataagccaggtcccaaacaaggccgcaacccacggaatggcggtgaccaccgacgctgtaaagcccacttttgttcccagcaatgccgcaacctgggtcggcaggaagaaaattaatccgtaaaccgccacctgaatggtcaggtagataatcgctagttgccagactcggccattacgcagcgcatcgctcagccgagaagtcactttctgttgttcttcacttgccagttgattgataagcaacgttttttcttgtttactcagaaaacgtgcctgctccggtgtgtcatcaagccaaaagaatgtgaataccccagcaccgactgccaacaatccttcaatcacaaacatccagaaccagccgggatgccccataaatccatgcatctccaacagcgcgccggaaagcggtgatcccagtgttaacgccagcggtgcgcccatatagaacagccccataatgctggcgcgattacgctgcggaaaccattgcgaggtgagataaatcataccagggaaaaatccggcctccgcagcacgaagcagagtgcgaactatcagaaatttcgcttcagtatcggcccatgccatggctgccgaaagaaatccccacagcagtgttgtcgtaccaatccaggttctggcccccagtttgcgcatcaaaagattcgccggaacacccagaaacgcatataccacaaagaaaatgcctgctcccagcgcataagcttcattactcaacccggtatcaatctggtaggtctgtttggcaaaaccgatattcgaacggtcgagaaacgccagcacatacagcgccaacataaacggaattaaacgcacacggtttttcttcaccacggcgtcaagcaaagcggtgctcataaaaagctccttagaatatgtgggcgttaccgttgtcacagcaacgcccggagtgattagtggctgtaggggcgtttcaaattgcagtcacgattgagttcgacgccaaaaccgggtttatcaagcactgatttatgaatacgaccattcaccggaaccggctcattgagcagaatcgggtcaaactgcggacgcatcgttgaacaatccgggctggtcatcaggaattcgctgaatggcgtattggtgaaggtgatcaccgcatggtgagagtaaacagacgaaccgtgcggcaccaccagttgccccctggatttggcgattgcggcaatttccaccagcgtggttaaaccaccgcaccagccaacatccggctgcataatgtcgataccggtttctgaaagcgtacgaaaagattgcagtgtgccgtggtgctcaccgctggtgaccatcattccgactggcgcgttgcgtttcagttcgcgataactttcatactgctgtggcggcaggcactcttcgatccatttcaggttatagggcgcgcaagcgtgggccagtttggtcgcatagttcacgtcctgactcatccagcagtcgagcattaaccagaaatcctcaccgcatttttcacgcatatccgcgaccatagcggcatctttgcggatccccgcatcgccatcatgtggcccccagtgcgtcggcattttgccaccgataaagcccatctcttttgccagatccggacgcgcacctgtggcgtagaactgaatctcatcacgaacagcgccgcctaaaagtttataaaccggaagcccgaccactttgccgaacagatcccacagagccagatcgacacaagaaatcgtattcatcaccaggccaccagagccggagtaatacagggtggcactgagcatttgatcgtggatcagtttgatatcactgacacatttaccctcaatgaaacggttaagatgtttttcgacaataaaacagcccatttcaccggctgtcgaaacggcgaatccggtctggccgttttctgcttcgacttcaacaaccaacgtgccaagaacgttaatgccaaatgactggcgtgactgctcgtaatcgcggtatttactcatcggggtggcaatatgatcgtctatccagtgattcgccccctggtcgtgataatcaccgccgccagcgcctttttctgctgtcgcaccgccagtaaaccaggcgcgaacctgtttaatttttggtagggtcatgatgttctccattgttatgaggcttgtaagtcaaagggacttttccatcccaacagacgtgaaatatccctggcgcaggcaatggccttgcccgccagataatcacggtattcttcattgatttgtaagcgggtaccgaccaccgagatcgcagcggtaagctcgttattggcgttaaacaccggcgcagcgacacaacggacatcggcgtaatcttcgccgttgtcatagctccagccctgacggcgaatacgcgccagttcttcgtgaagttgctgtggatgagtaatcgttgtgggtgtcgcctgctcccagaccagcccttcgataatactttgctgtaccgctgcaggttgccaggcaagcaggcatttacctattccggagcgataaagcgaaaggctttttccttcatgggaacgcacgctgatagtggctgatgactccactttcaaaatgtaataagcgctgccgttatcaataatccccaggtgacataacagcccggtggtatccatcagttgcgtcaaacgcggtcgagccagttcccggagatccatcttgcttaacgcatgaccggaaagctccaccagcctggtccacaaacaaaaattttcctggtgatcaaggctaagaaaacgctgacgcctgagttcattaagcagcaaataggccgtgcttttagggattcccaatgtgtcaatgatcgtcgcagcactacaggggccaatgcgggcaatcaaattgagaatatcaatagcccgtgtcagggcgggaactttgcttgattccaacatactggactccagtcttagatactggaatcagtctcgttgctcagggggagtaaaattgtgaagcgcatcaaatcccgctcctcgtccagcagactggagaaattacgcacaaatttgtgaatcagcgcacggattttttcttattgagtacaacaggttggacaaattttgccggagggggaatgtgccggtgcagtaaaccggcacagagtggcggaatcagacagataaggtcatggactcaacaacctcaatccagccatgctcactggcgatatcctggccgtttaaccaacggcgcagcatattcagtgccatcattgcgcacacttcctgacggatagccaggctgtagcgcgtagtgctgaaacgcacacgcagagcgaaagtgccgtctggcgtggctagcgcaaagttgagatgctcgttctcgaaacccgaaacagccagtgccagcccggcaaaatggttggcccgccgttctgtaatccagtgcgcagtttgcgccagggtttcctcctgtgaaggaaccacttcacacgccagcaatggagcacctgcgcgagaaagttgcaaagccaataaaccaccggtgaattgctcgctcaacgtcaggctgaactggcggttttgcaattcgcgactgatctgcgcgggcagtccttcagtgccttcgaaaatcacgctctgtccggcaacacgtttaacatccagccacagtttttccatcgcctgttgctcgcttgccggtccggtgagtttcagttcgatgataggcattgaggagcgatagcccattgttacgcccggcggcagttgtagagtgtccaggctttgtgccagatcgctttccgaacgaccaaaagtagtcaaacgcagacaaaccggcggctgcggtaaagaaaaacgctcgcgcaggcgcggcaggatttcgtgctcgaccatcaccttaaattctgacggtacgccgggagtaaagaacatcaggcaacgattaagctgcacggcaaaaccacaggcggtgcctaccgggttattgataaattcagcactggcaggcagctccgcttgtttacggttgctcggtgccattactcgtccacgttcgtggaaatagcgttccatctctttgagccaggcttcatgcagcaccaggccttcaccttttgctgtcgcagcggcgagtgcgcttaaatcatcgctggtcggtcccagcccgccgttaacgatcagcacatcggcgtgctgactacgttcgcgaagaatggtgactaagtcatcaaggttatcccccaccgtattgcggcgagataatggcaacccctgatgaaagaaaaaatcggccagccaggcagcgttagtgtcaacgatttgcccgtgtaacacttcatccccggtggataacatttccacttttaacatggttatctcctgcttttgttatcgaatcactataacgcaaagggagataaggcgtagtaagaaactgaatggcgcgacagaatgccgcgccggaagggatcagaaactggcgttaaccccaacatacgggccgtcagccacggcgttgtcgcggttaccgtctttacccgacagattcaggtagcgataacccgcctcaatactgactggacgcataatggtgtaacgcgcgccagcattcgcttcttcataactttgaataccgctggagagcgaatccggagagtagtaatactcgccaaacaaacggaagctgttgccaattttccactgcaaaccacctcctaccgctgcggcataaccttcatcgccgtaattcgggttggtgtaaacgccttttccgccaacggtcgccattaacggcccgagaggcagattcaaccccagccccacgccagcgacatcaccgtcgtcgtcgttatgtgtccagttaccgcttaacgccaggcccgtcgtttcagtcccaaaaccgacaccaatattggtgtattctttacccgcctgaccgctgatgctcattgcattgaccgatgcagaaaccaacagcattccggccagacctgctagcgcaatttttttcattatcccctttcccacaagcaattaatcaaaattcccaaagctgcgggattgtactgcctggcacagaggattcaatgagcgaaaaaaaggatctagtcacttattgtaactaaatacttcttaaataattaaatgccgaaaaaataaacacactttatcgatacacacaaaaataataataagtacagttatcatcgcaaaagagattactgtcactttcacatatttgtgagttaccgtattctcatggtttctttttatttataaggaatatccctgtgcgacaacggactattgtatgccctttgattcaaaatgatggtgcttatttgctgtgtaaaatggccgacgatcgcggcgttttccccggtcaatgggcgatttcgggtggcggcgtggagcctggcgaacgaattgaagaggcactacgccgcgaaattcgcgaagaactgggagaacagctgcttttgacagaaatcacgccgtggaccttcagcgatgatattcgcaccaagacgtatgcagatggtcgcaaggaagagatttatatgatttacctgatttttgactgcgtttctgccaaccgagaagtgaaaataaacgaagagtttcaggactacgcgtgggtaaaacctgaagatctggtgcattatgatttgaatgtcgccacccgaaaaacgttacgtttgaaaggtcttctgtaacaatgatgacagccattactggctgtcagattgaaaatttagtggttaacgaattccccatccagataaactttgcctttttccacatgcatgactaaaccatccagataatcaggtttaaatgtcgcgtcacgcttatctttagcaatatatgtcaggcaatgattatgggtgaaaataacgatatttttatcaggcgctttgctttgtaagtccttaattgcactataaatctcattaccgcactgaagaagtcgtttatctaccgtcaattttttacccgctgaaaaccaggtagccgactgaatggtccggacggtattactggaataaagatcgaaatcagggatatcagcactaaaagcgttgcccagttcacgggcatcctgggtacctttaaccgtaatacctgttttatctgacaagcattgattggttgaacggtcgcaacgttcagcatgacgaaacaaaacgacaaccgggtgctgctgtgccagtctggccagtgttttattgtcgatacgtggcaaaccattgctactccaggcggcatgagtacccagtccggcaattgcagcgagcgccagtaaaatgatgatatatttttttgacttcaacgaagagcggcaaaaagctaacacgtaaactccacctatagacaagcgcaaccagacaattaccgtgaaattgagctacatttctggcgataattcgcagttggtgtaatattaaaaatcctacgatgtcggcaaaatgcctcaaaattttgccaaatgcaaagcctaaataagaaaaaatataaaaatttcaatatttacgtctaatattagtttcttaaggttaagttaatattctatccttaaaatttcgctccaaatggcaaaatatacacaacactctttatagcaaatataagtggacaggtattcaatggcggaaggaaaagcaatgtcagaatttttgcctttttcgcgaccagcaatgggcgtggaggaactcgctgcagttaaagaggttctcgaatccggttggatcacaaccggtccgaagaatcaggcgcttgagcaagctttttgccagttgacgggaaatcagcatgccatcgcggtcagttcagccaccgccggaatgcatatcacgctaatggcgttgaaaattggcaagggcgatgaagtgattacgccttccctgacctgggtttcaaccctcaatatgatttccttgttgggtgcaacgccggtaatggtggatgtcgaccgcgatacgctgatggtcacgcctgaagctatcgagtcagccattacgccacgcactaaagccatcattccggtgcattatgccggtgcgccagcagatattgacgccattcgcgccattggcgaacgttacggcatcgcagttatcgaagatgctgcccatgccgtcggtacgtattacaaagggcgacatattggcgcaaaaggtaccgctattttttcatttcatgccattaaaaatattacctgtgctgaaggtggcctgattgtaactgataatgaaaaccttgcccgccagctacggatgctgaaatttcacggtctgggtgtcgatgcctatgacagacaaacctggggccgtgcaccgcaggctgaagtcttaacaccgggctataagtacaatctgaccgatattaacgccgcgattgccctgacacagttagtcaaattagagcacctcaacacccgtcggcgcgaaattgcccagcaatatcagcaagcactggcagctctcccctttcagccattaagccttcccgcctggccgcacgttcacgcctggcatctgtttattattcgtgtcgatgaacaacgttgtggtatcagtcgcgatgcgttgatggaagcgttaaaagaaagaggcattggtaccgggttacatttccgcgccgctcacacacaaaaatattatcgcgagcgttttcccacgctgtcgttaccgaataccgaatggaatagcgaacgcatctgttctttgccgctgttcccggatatgactaccgccgatgccgaccatgtcatcacagcccttcagcaactcgcaggacaataagccatgtttgaaatccaccctgttaagaaagtctcggtggttattcccgtttataacgagcaggaaagcttaccggaattaatcaggcgcaccaccacagcctgtgaatcgttggggaaagagtatgagatcctgctgattgatgacggcagtagcgataattccgcgcatatgctggtcgaagcctcacaagcggagaacagccatattgtgtctattttgcttaaccgcaattacgggcaacattcagcgattatggcgggattcagtcacgttactggcgacttaattattacccttgatgccgatctccagaatccgccagaagaaatcccccgcctggtggcaaaagccgatgaaggttacgacgtggtagggactgtacgccagaaccgccaggacagctggtttcgtaaaaccgcttcgaagatgattaaccggcttattcagcgcaccactggcaaagcgatgggtgattacggttgtatgctgcgcgcctatcgccgtcatattgtcgatgcgatgttgcactgccatgaacgcagcacctttatcccgattctggcgaatatcttcgcccgccgtgccattgaaattccagtacatcatgccgagcgtgagtttggtgaatccaaatacagttttatgcgcctgattaatttgatgtacgacctggtgacctgccttaccacaacgccgctacgtatgctgagtctgctcggcagcattattgcgattggaggttttagcattgcggtgctgctggtgattttacgcctgaccttcggaccacaatgggcggcagaaggcgtctttatgctatttgccgtgctgtttacttttattggcgctcagtttatcggcatgggattactcggtgaatatatcggcaggatctacaccgatgtccgcgcccgcccccgctattttgttcagcaagttatccgtccatccagcaaggaaaatgaataatgaaaaccgtcgtttttgcctaccacgatatgggatgcctcggtattgaagccctgctggctgccggttacgaaattagcgccatttttacccatactgataatcccggtgaaaaagccttttatggttcggtggctcgtctggcggcggaaagaggcattccggtttatgcgccggataacgttaatcatccgctgtgggtggaacgcattgcccaactgtcgccagatgtgattttctctttttattatcgccatcttatttacgacgaaattttgcagctcgctcccgcaggtgcatttaatctgcatggttcgctgttaccaaaatatcgtggtcgcgcgccgctgaactgggtgctggtcaacggtgaaacggaaactggcgttacattgcaccgaatggtgaaacgtgccgatgccggggccattgtggcgcaactgcgcattgccattgcgccagacgatatcgctattacgctgcatcataaattgtgccatgccgcgcgccagctactggaacagacattacccgccattaaacacggtaatattctggaaatcgcccagcgcgaaaacgaagccacctgttttggtcgcagaacgccggatgacagtttccttgaatggcataaaccggcatccgtactgcacaacatggtacgtgccgttgccgatccgtggccgggtgccttcagctatgttggcaatcagaaattcaccgtctggtcgtcgcgtgttcatcctcatgccagcaaagcacagccggggagcgtgatttctgttgcgccactgctgattgcctgtggcgatggcgcgctggaaatcgtcaccggacaggcgggcgacggcattactatgcagggctcgcaattagcgcagacgctgggcctggtgcaaggttcacgcttgaatagccagcctgcctgcaccgcccgacgccgtacccgggtactcatcctcggggtgaatggctttattggcaaccatctgacagaacgcctgctgcgcgaagatcattatgaagtttacggtctggatattggcagcgatgcgataagccgttttctgaatcatccgcattttcactttgttgaaggcgatatcagtattcattccgaatggattgagtatcatgtcaaaaaatgtgatgtcgtcttgccgctggtggcgatagccacgccgattgaatatacccgcaacccgctgcgcgtatttgaactcgattttgaagagaatctgcgcattatccgctactgcgtgaagtaccgtaagcgaatcatcttcccgtcaacttcagaagtttatgggatgtgtagcgataaatacttcgatgaggaccattctaatttaatcgtcggcccggtgaataaaccacgctggatttattcggtatcaaaacaattacttgatcgggtgatctgggcctatggcgaaaaagagggtttacagttcaccctcttccgcccgtttaactggatgggaccacgactggataaccttaatgcagcgcgaattggcagctcccgcgctattacgcaactcattctcaatctggtagaaggttcaccgattaagctgattgatggcggaaaacaaaaacgctgctttactgatattcgcgatggtatcgaggcgttataccgcattatcgaaaatgcgggaaatcgctgcgacggtgaaattatcaacattggcaatcctgagaacgaagcgagcattgaggaactgggcgagatgctgctggcgagcttcgaaaaacatccgctgcgccatcatttcccaccgtttgcgggctttcgcgttgtcgaaagtagcagctactacggcaaaggatatcaggacgtagagcatcgtaaaccgagcatccgcaatgcccaccgctgcctggactgggagccgaaaattgatatgcaggaaaccatcgacgaaacgctggatttcttcctgcgcaccgttgatcttacggataaaccatcatgaccaaagtaggcttacgcattgatgtcgatacctttcgtggcacccgtgaaggcgtgccgcgtctgctggaaatcttgagtaagcataatattcaggccagcatttttttcagcgtcggcccggacaatatgggccgccatctctggcgactggtgaagccacagtttttgtggaagatgctgcgctcaaacgcggcatcgctttatggctgggatattttactggcaggtacggcctggccaggtaaagagattggtcatgccaatgccgatatcattcgtgaagcggctaaacatcacgaagtcggcctgcacgcctgggatcaccatgcctggcaagcccgtagcggtaactgggatcggcaaacaatgatcgacgatattgcacgcggtcttcgcactctggaagagattatcggtcaaccggtaacctgttctgccgctgcgggctggcgtgccgaccagaaggtgatcgaagcaaaagaagcgttccatttgcgctacaacagcgattgtcgtggggccatgccgttccgtccattgctcgaatcaggaaaccctggcactgcgcaaattccggtgaccttacccacctgggatgaagtgattggtcgggatgtgaaagcagaagattttaacggttggttactcaaccgcatcctgcgagataaaggcacgccggtttataccattcatgcagaagttgaaggctgcgcttatcagcataattttgtggatctcctcaaacgcgcagctcaggaaggcgtgacattttgccctttaagcgaactgttatcagagacgttgccgctcggacaagttgttcgcggaaatattgccggacgtgaaggctggctgggttgccaacaaattgcgggtagtcgctgatgaaatcggtacgttaccttatcggcctcttcgcgtttattgcctgctattacctgttaccgatcagcacgcgtctgctctggcaacccgatgaaacgcgttatgcggaaatcagtcgagaaatgctggcatccggcgactggattgtgccccatctgttagggctacgttatttcgaaaaacccattgccggatactggattaacagcattgggcaatggctatttggcgcgaataactttggtgtgcgggcaggcgttatctttgcgaccctgttaactgccgcgctggtgacctggtttactctgcgcttatggcgcgataaacgtctggctctactcgccacagtaatttatctctcattgtttattgtctatgccatcggcacttatgccgtgctcgatccgtttattgcattctggctggtggcgggaatgtgcagcttctggctggcaatgcaggcacagacgtggaaaggcaaaagcgcaggatttttactgctgggaatcacctgcggcatgggggtgatgaccaaaggttttctcgcccttgccgtgccggtattaagcgtgctgccatgggtagcgacgcaaaaacgctggaaagatctctttatttacggctggctggcggttatcagttgcgtactgacggttctcccttggggactggcgatagcgcagcgggagcctaacttctggcactattttttctgggttgagcatattcaacgctttgcactggatgatgcccaacatagagctccgttctggtactacgtgccggtcatcattgccggtagcctgccgtggctgggattactccccggtgcactgtacacaggctggaaaaaccgcaagcattccgcaaccgtctatttgttgagctggacgataatgccgctgctgtttttctccgtcgctaaaggtaaattgcccacctatattctttcctgctttgcatctctggcaatgctgatggcgcattacgctttgctggcagcaaaaaataatcctctggcgctgcggattaatggctggattaacatcgcttttggcgtcactggcattattgccacatttgtggtctccccgtggggaccaatgaacacgccggtgtggcaaaccttcgagagctataaagtcttttgtgcctggtcgattttttcgctatgggcatttttcggctggtacaccttaacaaacgtcgaaaagacctggccttttgccgcgctttgcccgctggggctggcgttgctggtaggattttcaattcctgacagagttatggaaggaaaacatccgcaattttttgtcgagatgacacaagaatcacttcagccaagccgctatattcttactgatagcgtcggtgttgccgcaggtctggcatggagcctgcaacgcgatgacatcatcatgtatcgccagacaggtgagttgaaatacggccttaattatccggatgcgaaagggagatttgtcagcggtgatgagttcgcaaactggcttaatcaacatcgtcaggaggggattattactctcgtgctttcggttgaccgcgatgaagatatcaacagtctcgccattccgcccgcagatgccatcgatcgtcaggagcgtctggtgctgattcagtatcgtcccaaatgatctggctaacattagtctttgccagcttgcttagcgttgccgggcagttgtgtcagaaacaggcaacctgctttgtggcgataaacaaacggcgcaaacatatcgtgctgtggctgggactggcgctggcttgtcttggtcttgccatggtgctctggctgctggtcttgcagaacgtaccggtaggcattgcttacccgatgttaagtctgaattttgtctgggtgacgctggctgcagtaaaactgtggcacgaaccggtatcgccgcgtcactggtgtggggtggcgttcattattggcggcattgtgatcctcgggagtacggtgtaatgggcctgatgtggggattattcagcgtcattattgcctcagttgcgcaattaagcctgggttttgcggcgagtcatctgccgccgatgacgcacttatgggattttatcgcggctctgttagcttttggcctggatgcccggatactgttactcgggctgctgggttatctgctttccgttttttgttggtataaaacgcttcataaacttgcgctaagcaaagcctatgccttgctcagtatgagttatgtgctggtatggattgcttcaatggtacttcccggctgggaagggactttttcgctgaaagcactactgggagtagcctgtattatgagcgggttgatgctgattttcctgcccacgacaaaacaacgttactgagttttccctgccactttacactgccgttcccactcatcggggctataactgcttgccgagaggactttcaccgtatgcagcttttcacgattaatacaataaagcgcattctgcaaaggcgagagtaaatcccccactttcacggcgaagtcactcttcacttcggcgatcatttttatcgcgccgccagcatcgcagagcataagtacatgtctgttatcttgtttattgcagcacgattttttgaccagccattccattgcattatcctgtttgctaagagttttcacatcaatttacagattaacagataaactctttatcaacggcaatggaatggcagaaatgagaagtgaaacggagggttaattattgctgacgttgcacccactcttttagcgcctgacgtgaaattttaataccgccgtttttcagctccggcggcagagttagccagcgcaccggttgttgaaaacgggccagcttatctttcacccattcactaagatcaacgctctcgtggtcatactccatcaccgccaccggtcgatgaccaaactccttgtcggcaacggggacgataaacacctgcaaaaccgcaggatgtgcagcaattacgcgctcgacttcttccggctgaataccctctccgccactgaagaatagattgtctaaacgtccgacaatggtcagcttgccattatgcatctcaccgcgatcgcgcgtagcgtaccagccttcgtcattaaccagtgaaaccagttgcccgttacgccagtaaccttctgccatactggcagcccgcagccacacttcattattaacgattttcacttcccgacccggcagcggcgaaccaacgtctgccaggccgtcggcttctttcgcacacaccgtggaggcaaactcggtcagaccatagccgcaaaagcaacgaatcccctgctcgcgcgcctgttccgtcaactcgaccgggatagccgcgccgccaagtaacaccgctttcagggaaacggaactacggttaaccagcaaacgccagagttgtgttggcaccagtgaagcgtgagtacagcctgccagcatttgctccaatggctgtttatcacgtaccgtcatccgcgcaccagcgtataaccagcgccacataattccctgaccggagacgtgaaacagcggtaaagagagcaaccaatcatcgtgatcgccaaacggaatcagcgataacacaccttgcgcactggcaagatgggcctgataagtatggacagcggctttcggcaaaccggtagaacccgaggtcaacgtcattgagcacagacgcgtcggctgccacgtagcggcatgtgcgccttcaaccagctgaatgtgcagcgacgttaatgccggaaacgtgttttccccatccggcaccagagcaaattgcagcgtcagattgggcagcaattcttcaagcaacggttgcggcagctgagggttcacgggcaacacccgcgccccgcattgcagtaacgccagccaggcgagcagcgtttgcggcgtattccacgcccgcaacatcacgccgctgccctcaaccaccccctgcaccgcaaatccggaggctaattcatcgacgcgagcacaaagctcgcgccagttgagttgctcgtcattaagacgtaaggcgatggtttctccccgcacttgccgccagtgacgccacggccagtcagagaagatcataacaaccgctccagtgcatcaacttccacgacaggcagcgtgctacccggccagcgacgtacctgctgcgcctgcatcagatccagcgtgtccagccctggaatggtgtccggcgttaaccaggcggcaatccgcgccagttgcgttaagcctaagctcgattcaatggaagaactgatcaccgccgtcagccccagcgcgtgcgccgcctgtacctgctcgcgtactttttccagactgcccgtgagcgtgggtttgataactaccgcgcgcacgccctcttcagccacaaaggcaaaatccggctcgcgcaggctttcatcccaggcaatggcaatgccggtttcacgggcaaacgctcgcgaatcatcgcgggttttgcacggctcttcgagaaacgcgatgcggtcgcgataatccgggttaacgtatttggcaaactgctgacctttcagcggtgtccaggcgcgatttgcgtcaagacgcaaatgcagatccggaattgcctccagcaacagattcaccaccatgccgtcgcgcaccgcttcgtacaatcccactttgaccttcgccactttctcgcctggcatatctgcaagtttgaggatcagatcgtccggatcgccattacacagcggtgccgcacggtagttggctgcttgcggcaacgtatctgtcagttctgccaatgcacagcttacgccaaaggccacggaaggcatctgcggtagctcgcaatcgcctgccagccagttatttacccaggcaagcagcacactttgcgcctcttcccaggtttcctgactgaagcccggcagtggggagatctccccccacccttcgcgctcgccttcacgcaggcaaacatacagcccgtcgcgggtttttaaccgcctgtcgcgcagaaccacccccgcgtccatggggatctgccagcggtatacctgcgcgctacgcattacggattccgtttgaatttgctgaagtcaggctgacgtttctggttgaaggcgttgcgaccttcctgaccttcttccgtcatgtagaacagcatggtggcgttgcccgccagctcctgcagccccgcctgcccgtcacagtcggcgttcagtgcagctttcaggcagcgcagcgccatcgggctgttttgcagcatttcgcggcaccaacggacggtttctttttccagatccgccagcggtaccacggtgttcacaaggcccatatccagcgcctgttttgcgtcgtactgacggcacaggaaccagatttcacgcgcttttttctgcccgacgatgcgagccatgtaggaagcgccccagccgccgtcgaaggaaccgactttcgggccagtctgaccgaagatggcattatctgccgcgatagtcaggtcgcacatcatgtgcagaacgtgaccgccgccgatggagtagccagccaccatcgcgacaaccggtttcggacaggtacggatctgacgctggaagtccagcacattcaggtgatgtacgccggaatcatctttatagccgccgtaatcaccacgcactttctggtcaccaccggagcagaacgctttatcgcctgcaccagtcagaatgatcacgccgatgttgtcgtcataacgcgcatctgccagcgcctggatcatctcttttaccgtcagaggacggaaggcattgcgcacctgcggacgattaatggtgatttttgcgataccgtcggtggatttttcataacgaatgtcctcgaaaccttcggagcagtcgtgccattcaaccggtgcgtaaagcattgcttcatcaggataaatcatattgtgtcctttagtcagaaacgcaagatctgcgccagacttgcgattacgccagcgggattttcccgatgcgcgttatgtccggcgcgaggaatgacatggcagtcggcagccagttccgccgccagggcgcggaatttgctgtcacgttcaccacataaataataaaacgcaaatgtgcgggcgctaaggttagcacgtaaatcaggctggacggcgagagaagtcgcctccagcatggcggcaagcgttgcgccattattgttgctgcgcagcgccaccagctcccggcgttgatcgtcattgagtgaggcaaaaacaggctgttgataccagtcggcaaataccgccgttaacggttctgtgagaaaacgctgcacccattggcgatcggaacgctgacgttccgcacgttgttcagcattttgcagccccggatgcccgccttcgacaataaccccacaaagccccgccagcccctggcaagccgccatcatcgccacccgtccaccaagcgagtaccccaccagccagaagtcaaggatgttgtaactaaccaaggttttacgcagtaagtcggtgacatcatcaaatccatcgacgctaatcgccgccgaaccaccgtgacctgggagatcaacatacaaccgtgagtagtcggcaaacgcctcgcccacttcttgccattcgtggcaatcgccggaaaaaccgtgcaaaaacaccagccagggtaaacctggttttccgtgttttgcctgcgcgtgcaggatcataaatggcttacctgcgccagaagttgctggagcgtttgcgcaccatcggtgtcgttaaccaccatttcaatcaccgtggtggttggcgtgcgccaggcgtcggcaaatgccgtttcaagttcctgccagttttgcggacgatgatatttcagctcgaacatcgcggcggcgtgctcaaaatggacgttttgcggcatcagatagaaacgctcacgctcgctttgcggcgttggcaacagcgagaaaatttgcccgccgttgttgttcaccacaattaataccagcggcgcagaaacctgacgcaataacgccagcgcgttgagatcgtaaagtgcggagagatcgcccacaatcgccagcgtcggtttgccgcttgcccgctgaacgccggcggcggtcgaaagcagcccgtcgataccgctggccccacggttgctgtacaccgggtaacctgccggaagttgcgaaagcgcatcaatcagacgtaccaccaggctgttaccaacaaacaattgcccctgttcaggcagatagtcgcagatgcgatgcgccagttgcgcttcgccaaacgcatcacggcgggcaataaccgcctgcattgcctgttccgccaggcgcgggatttcaacgcaccagggctggcgtttttctgccggatgcagctccagccagtcggcaatattggcaattaagcgacgtccgcgatggtgtgccggatcaagtcgcccttcaatgtcatcaacaatccagtactcttctggttcacagcttgcctgccattgcaggagccgtttccccgtcaggctgcttcccagttgcaccacaatttgcgcctgctgcagctcgctggtcgctttggcattgcctaaccaaagatcggcacacggcagcggctgcccggtttgtgacagcacatcgccaatcagcggccagccaagagtttgcgcccacagggcaacttttttgccctcttccgcactcatgcgcccggcaaccaccacgccgcgcttttgtcgccagaagaaccagtcgcgctgtttttcactttccagacgaggcgcttcacgcagccacggtttgtcgtcctgccaccagtcacccagacgctgttgccagctaagcccggtatcgtccatttcgccatacagcggttcagcaaacgggcagttgatatggactccccccgcatgaagcgtaccgagagcgtggtcgatggtagaaaccagccaacgtgcggggatatcctgggtcgggcgcggcaatgaaatactgtgcgtggggtgagaggcgaacattcccggctggcgaattgcctgattcgcgccgcagtcaattagctccggcgggcgatcggcggttaagagaatcagtttttctccggttaacccggcttcaatcagtgccggatagagatttgccaccgccgtgccggaggtcacaatcaccgccaccggctgcttgctgactttcgccagccccagcgccagatgccccaacccacgctcatcgaaatgggtgtggtgaatgaatgcggaattctccgccgccgctaacgttaacggtgtagaacgcgagcctggggcgatacagatgtgtctgacgccgtgacgcgttaatgcttccagaatgaccgccgcccagcgtcggttaaatgcgcttactgacatgagtttgtccggtatcaatattgcggctaagtataaggagctacaaaaatagattattgatatgaatcggtaatgatgcgactcattactattccatttgtaataaagtacgcagccctgccgctttgttgtcgatttcctgccactcttgctcggggtcggaaccacggacaatgcccgcgccagcatataatcgcacgacattgccgctaatttttgctgagcgcagggaaacgcagaattcgctttgttgtaatgagagatagcccgcagaaccggcgtaccattctcgggtgaacggttcgtgacgggcgataaactgtcgcgccagatcgcgcggtaagccagcaactgctgccgttggctgcaactgatgtaaacagatcacatcatccgctttgttgagtgaagtccagatacagcggcgaagatgctgcactttacgcagacgcagtacctgcggcggtaaaacatccagcgtctgggtatcggcctgtaatcgttgacagatatcttccaccaccagcatgttctcgcgctggtttttatcatccgccatcagccactctcctaactgctgcgcctgcttatcatcaggattatttgctactgttcccgccagcgcttcagtacgcagcgctttgtcacgccgccgccataaccgttccggtgaagagccaagaaaagcattttcgccatcaaaggccatgtaaaaatggtagcaattcagattcagtcgacgactggcagccatcatcgccgccgcgttgaccggacttgcgaaatgcaggtcagttgcccgagcgagcaccactttgtcgagctcaccttcggcgatggttttcgttgccagttcgattaattgcgtccagcccgttttgtccggccagtgttgttctcgcgtggtggttaaatgtaacccaggcaagggcttgatactcaccagtgtggcgataaattcttttgcctgaatcgcatcgtgctgaagggagctttcgctgaatagcgtcagccgcagcgtggctttaccgccacagcgtcgccattccaggcggggtaaaagtaaattgccctgcgacgggtcaaaagcattcagcccccaaatgcgtaagtcggcgtgttccgggtgctggcgaagaaaacgttgtgcctggtccaacgacgtaaaacgggtaatcgcgcccaggacgacagcttcttcatcaccattacgttgttgccagtagaattgcgggtatgtttgctgactggccagccagctcaaggcatcaaaagcgtctttgagagggaaaggaatatcgataacccgaatgccgggtgtcgccggaatctcttgcgacaaatggcgcagtagattttccagcgccgtagtaagtgattgcacgcggacctctccctgttaaaagcctcacattatacggggtactacaaaaaaaatgcagtaccccggtgtagggaggttttaacggcgtgccagcaacagtcctagtaccagcccaacggccgcgcccacaccaattccttgccagggtttttcgtggacgtagtcatcagcacgataaactgcctgcttcgcccgatagtaataactgtctgaagcctggctaacccgttttttcacatcatccagcgctttttctgcacgcgctttcagctcaacatatttctgatcggcgggatcgccagaggagcggagcacctcttccagtgtttcactaagcagcgtcaggtcgtcatcgatacgtgtatcaccaaactgattagacattctcgttctccatttgcgtaaaacctgtcactaactatagacaagggttgttgattacgcctgaattacctcgcgtgccatcccaatgtgtgggataccatcttcttcatagacctccgtcacagggataaaaccgaaactctggtagaagttttgcagatgcgcctgcgccccgaggtaaacaggcttatcaggccagtgatgcgtacatgtttcgagtgttttactcatcagctgctgccccactttttcgccacgcaacgcttcactgacaatcacccgacctataacgaccggctcaagatcatcatcacttttcagaatcctcgcatacgccaccagttcatcatttttccaaccgagaatatggcgattatcccccgtcaaatcatcaccatcgatatcctgataagggcaattctgctcgacaacaaacaccgcgcaacgcagttgtaataaggcataaagctgggaaaccgataattcagagtgatgcagatcttgccattcaatcataatgctctccttttagatgtatgccttatactagccggaatattttttgaaacgtgatgaactcatggaattaatttttttaggtacttcagccggtgtgccaacccgcacgcgcaatgtcacggcaatattgcttaacctgcaacatccgacccagagcggactttggttgtttgactgcggtgaaggcacccagcatcagctactgcataccgcctttaaccctggaaaactggacaagatttttatcagtcaccttcatggcgatcatctttttggtttacccggcttgctgtgcagtcgttctatgtcaggcattatccaacccttaacgatttatggtccgcaaggtatccgtgaatttgtggaaaccgcgctgcggattagcggctcatggaccgattatccgctggaaattgtcgaaattggcgctggcgaaattctcgatgatggcctgcgcaaagtaaccgcttatccgctggaacacccactggaatgttatggctatcgtattgaagaacatgataaaccgggtgcattaaatgcccaggcattaaaagctgctggcgtgccgcctggcccactgtttcaggaattaaaagcgggcaaaacaatcacgctggaagatggaaggcagattaacggcgcagattacttagctgctccagtgccaggtaaagcgctcgctattttcggcgataccggcccctgcgatgccgcacttgacctggctaaaggtgtcgatgtcatggtgcacgaagcgacgctggatataaccatggaagccaaagccaatagtcgcggccatagctctacacgccaggctgcgacactagcccgtgaggctggagtcggcaagctaatcattacccacgtcagctcgcgctatgatgacaaaggttgtcagcacctgttacgtgaatgcaggtcaattttcccggcgactgaactggcgaatgatttcaccgtgttggtgatgctgccaacttactgatttagtgtatgatggtgtttttgaggtgctccagtggcttctgtttctatcagctgtccctcctgttcagctactgacggggtggtgcgtaacggcaaaagcaccgccggacatcagcgctatctctgctctcactgccgtaaaacatggcaactgcagttcacttacaccgcttctcaacccggtacgcaccagaaaatcattgatatggccatgaatggcgttggatgccgggcaacagcccgcattatgggcgttggcctcaacacgattttacgtcacttaaaaaactcaggccgcagtcggtaacctcgcgcatacagccgggcagtgacgtcatcgtctgcgcggaaatggacgaacagtggggctatgtcggggctaaatcgcgccagcgctggctgttttacgcgtatgacagtctccggaagacggttgttgcgcacgtattcggtgaacgcactatggcgacgctggggcgtcttatgagcctgctgtcaccctttgacgtggtgatatggatgacggatggctggccgctgtatgaatcccgcctgaagggaaagctgcacgtaatcagcaagcgatatacgcagcgaattgagcggcataacctgaatctgaggcagcacctggcacggctgggacggaagtcgctgtcgttctcaaaatcggtggagctgcatgacaaagtcatcgggcattatctgaacataaaacactatcaataagttggagtcattacccaccgtgtttaacgtttaactctgcttattattaaaaacagggcgaaacttgccctgttatcgcaacccgcgctacatatatccacccacacaggcatattgagcgatttttgatatttattcatctccttacgcactatattcagagcaataagttgcctcttttcatcttgattcagcacaacctttgcaactaaaaggagcccatgatggttacagttgtcagcaattattgtcaattatctcaaacgcaactcagtcagacatttgcagaaaaatttactgtgaccgaggaattactgcagtctttaaaaaaaacagcgttatccggagatgaagaaagcattgagttactgcataatattgcgttaggttatgataaatttgggaaagaagctgaagatattctttaccatattgttagaaccccaacaaatgagaccctatcgattatccgacttatcaaaaatgcttgtttaaaattatataatctggcacatatcgcaaccaactcccccctcaaatcacatgattcagatgatctcctgttcaaaaaactattctccccttcgaaattaatgacaattatcggtgatgaaattcctcttatatctgaaaaacagtcgctttcaaaggtgcttttaaatgatgagaataatgaactgagtgatggtacaaacttctgggataaaaatcgtcaattaaccacagatgaaatagcttgctatcttcagaagatcgccgctaatgcaaaaaatactcaagtcaattatcctactggtctctacgtcccctactccaccagaactcacctggaagacgctctcaatgaaaatattaagagcgatccatcatggccgaatgaagtccagttattccccataaatactggcggacactggatattagtttcgctacagaaaatagtaaataaaaaaaataataaactacaaataaaatgcgtcatattcaactcattgcgtgcactaggctatgataaagaaaattcacttaagcgtgtcattaatagttttaattctgaactcatgggagaaatgtcgaataataatataaaagttcatttaaatgaaccagagataatatttttacatgccgatcttcagcaatacttaagccaaagttgcggtgcatttgtgtgcatggcagcccaggaagtgattgaacaaagggaaagcaattctgacagcgccccctatacgttattaaaaaaccatgctgacagatttaaaaaatattcagcagaagagcagtacgaaattgattttcaacatcgactggcaaacagaaattgttatttagataaatatggcgatgcaaatatcaatcattattatagaaacttagaaataaaacactcacaacccaaaaatagagcatccggcaaaagagtgagttaacatcattgttaattaattcgaccagtcagcaaatatgctgactggtcgaacatagtttgctaaacagtcatcactgactgatgtcagtcacaccatccgccagttcaatcaggcgaataaattccgccctgtaaccctgtggatcttccccttttgcctgctgagcccactgtttgatctgctgccaggaggtattgttcaggtattcagaaccgcgtaacttttgcccatatgcagctactgctgcgcgaaaacgcatatcttcagagggcgcgtttattgttggccccagcgggaattcaactaactgactttcttttccctgcgggtatttccagcgaatttttaaccaggccagttctttcgttttgtccgatttcgctaatttgttatccggggcatagcgtaacttatcaattgatgctttttgcccgttcagcgttaattcgaataacaacgttatatgtttgcctgcgcctatatcccctgcatcaacgttgtcgttattaaaatgttccacccgaagttggcgcttttcataaccaatctgacggtattccgttacccacgcggggttaaactcaatttgcgctttgacatcttttgctacggtaatcaacatctgccgcatttcactattcaatactttctgcgcttcagagagggtatcaatgtagctgtagttgccgttaccaacatcggcaattcgcaccatcattgcctcgttgtaattgctattccccacgccaaacgtcgacagagtaacaccagactcccgctgttttttgaccattgattcaatcgattttggatcgtcaatgccaacgttaaagtcaccgtcagtggctaataaaatgcgattgatgccgcccttaataaaccctttcgtcgcctgctgataagccagttccagcccggcaccgccattggtactgccttcggcatccagcgaatcaattgcggcattaatttccgccttatgactcccggagatagaaggcaatgcaatacgggagtcgccagcgtaggtcacgatggcaatgttatcctgctcacgaagttctttgaccaataatttcaacgaagactggataagtggcaaacgttcatcagaaatcattgaaccagaagtgtcgataagaaagaccagattagaagctggtaactcttcacttttgcgatctttcgccaggatatcaactttcagcaatgttcgctgttcattccatggtgcaggtgccaattcgtagcgcatagcgaaaggtattggcttagaggccggaatagattgtttgtctttgatatcccaatcagacgggaaataattgactatctcctccacccgcacagcgtctggcggaggtaacagcccttgattgaggaaacgccttacattcgcataactgccagtgtcaacgtcaagactaaacgtcgccaacggattttgcgctacctgcttaaccggattatcatcgaactgctggtagcgagcggttcctggatttgcgatatgtgtagcttttgctttagccgctcttgcaaatgttggcgcttcctgcaatcgcccctgtaaagcctgtttgtctgaatattgttgcacttcttgctgggccaaggctttcgcggcggcggcgctttgctcagcctcttttattgcagcttgctgcgcggcaagcacttgctgctctgtgggagtactgggttgttgttgctgactttccttattctcaggttgcggcccacatcctgacaaaatcaaactactcataagcaacatgattatatttttatttcgcatataaaatccttttaaataaactcaggcaccagacataaaatatactctttgtataatcctgctaatcttaataaaatacaatatcgaaacccatagcaaataatgattcaacaacgcaacccattaataatttgcatatgaaaaaaataatctttgcttttattatattatttgtgtttttactccctatgattattttttaccaaccctgggtcaatgcattaccgtcaacgccccgacacgcaagtcctgagcaattagaaaaaacagttcgttatcttacacaaactgtgcatccacgtagtgccgacaatattgataatctgaataggtccgcagaatatataaaagaggtctttgtcagtagcggtgccagagttacctcgcaggacgtccccattacgggtggcccctacaaaaacattgttgctgattatggtcctgccgatggaccgctgattattattggtgcgcattatgactctgccagcagttatgaaaacgatcaattgacctatacgccgggcgcggatgataacgccagcggtgtggcaggattactcgaactggcacgtttgttacatcagcaagtaccgaaaacaggcgtgcagctggtcgcctatgcgtcggaagaaccgcccttctttcgtagcgatgaaatggggagcgcggtgcatgcagcttcgcttgagcgtccagtgaaattaatgatagcactggagatgattggctattacgactctgcgcctggaagccagaattacccttacccggcaatgtcctggctttatcccgatcggggagactttattgccgtggtcggcagaatacaggatatcaacgccgttcgtcaggtaaaagcggcattgttgtcatctcaggatttatctgtttattctatgaataccccagggtttattcccggtattgatttctctgaccacctgaattattggcaacacgatattcccgccataatgattactgacaccgctttttatcgtaataaacaataccacttgcccggtgataccgcagacagattgaattatcagaaaatggctcaggtagtggatggtgttataactttgttatacaacagtaaataataaaaatttctcgaggcgggtccagaaaaagcgacatgcacattttattttccctcatctgttttaagatgcgaaacatgaaattcaacggaggaaaaataaatgggaatgattggctattttgcagaaattgactcagaaaagattaaccaactgcttgagtctactgaaaaacctttgatggataatatacatgacacgctttcaggattacgccgactggatattgataaacgctgggattttttacactttgggctgacaggcacctctgcttttgatcccgcgaagaatgatccgctgagtcgtgccgtgcttggtgaacacagcctcgaagatggcatagatggcttccttggattgacctggaatcaggagttagccgcgacaatcgaccgactggaatcactggatcgaaatgaactgcgtaaacagttttccattaagcgactcaatgaaatggagatttatccgggagtgaccttttcagaagagttagaggggcaactctttgcctcgatcatgcttgatatggaaaagctgattagcgcgtatcgacgtatgctgcgacaagggaatcatgcgctgacggttattgttgggtgatatagcttgatgcctgggggagaaagacccattagttaagatttacgccaggatcatcttgaaaaaatctttaaccatggtccggtttttatccccttgtataaatattactaaatgcttgcttagtcgcattgttaaatgcaataccgtatattcggtatgtaacagcgatatcctctgtgctggcaacgatctgtcatgcttgatgaaaacggaattgaacctgtcattaccaggtagataaaaagcctgttcaattttgggattattttttataactcgtgtctgttatggcgacacgggaaaacatcaatattgtccttcacaaattgcagtaatatagaatcaacctctcttgcaagttggtcacaatgtattataagcattttgaatatgtcatcctctgtaatctcgtgaaaattttcggccttgtcttttagctcatcatatcggattcttgcagtaaccattttttgggcgagttctaataaccccaaagcttgcaattgctggtgagtatgatcactttcaaaaaatatcccacactccattccttcccaaccaacatattcatgccattcataaaccagcataaatgtttgtaaaactggcggtaataattggatatctgcaaaaccaaaccaaaacttacgcttgagatcccactcatattcaatcgccaatgctatattgtttaaggcatctccggcatccttatttttacgcaaaatcaattccgtcagtgtatagcgttgttcatcaatacgccgaagagcttctgcaatatcatagtttgtagccaacaaaacattctctgcttcctgatgagtgacgtctgcttttgccgtcaatatattgatttggtcaatatgaaacaacttgatggcttcatcaacatcaccgccagtcctctctaacaaacgtctggcaacctggataccgacaggtacgttcttccgaagtttacgaatttcacttaaccattccatgtcaaacccctttaaatatttatgatattaaatataacaacgtctggataacgacccggcctgactgaatatctcacgttttcctgcttaacattcatgttatgatgctcttgaaactaataatacgtatggaattgtcactatttatctgctaatgaattcaaacaatgtcattcgtttgatgaatatattatttcagggaataattatgacacctttagaacgcattacccaacttgttaatatcaatggtgatgttaataatcctgatactcctcgtccattgttatctcttgaggatttttttattgacaataatatccatggttcaatatgttgcaatgtgattccagaacaatctccgcaagctatctatcaccattttctgaaaatacgtgagcgtaacaatgttagtgatgttttggtagaaattacgatgttcgatgacccagactggccctttagtgaaagtattttagttatcaccactgcttcaccagaagaagttcagagctggtttgtagaagaaattgcccctgatgagtgctgggaaggatggtcagaagatacggagcatggatgggttgaagtccctgtgggtatgcatccggttacttgttggtgggattaaaacatttatataaacagataagcggatgtttacataaatttttatgtgaaggaacatgatgaaacttattcctcgcagtagtgatatttcacctggcattgatggaatttgcccggggccttttcctccgaacggatttaccgtacttacagatgcagcatatggtaacggagactgtttcggtttgtactggcctattggtcaggagcataaactacctatagtgtgcgaaacgtaccatgacgaatggcgaatcgtacctgccttttccagcattaagaagttcgaagaatggctggaagtgaatgatgatgatccccatgaaaatggcatcagcatcgaagatcaagactttgcagcaaatctcttccgtgttgctcggaaatgtctttcaacgggaaggcttgatgacgcactgccactgttacagcgagcaacagaacaattgcctgaagtcagcgaatattggttagcactggcaatccagtatcgccgatgtaaaaaaacagaagctgcagcacaggctgcgcttaatgcttatcttggcaattgggcatttggtgttcctgacaataaagtcattcatttgctgtcacaggccgcagatgtcccgaatttccaggatgatcctgtgattcagtgcattaaagaacaaggattagatcttagctttggaggaacaaaggaaaataataattaccccttgatgcagatgtgtgttgatacttattttgcgcagagaaaaccgcttcaggcattaaccctgttacataattatgcctggataatgtccagtgaaacgactgcatttcaggaacgctatgattttaatatcgatgaatggcgggcaaaattcaggcagttatgtttagagtattttggcgatagtcgtacacagttcacttaacgctctgcgtctatctactatcccttctttttcagaaaaaccgccgagcatgtcggcggctttctgacttacaaagtaacagattacatcagcggcattgccaaacgcacaatgctaatcagcggttgtggccatacacccagcaccagtaccaacagtgcagagatcagcacaacgataccgcccgcgctgtactgccagtttgatggtgcatcgcgacccggttgttccggggcgtgaagatacaggctcaccgccacgcgcaggtagtagtagaggccgattgccgaaccgacaaccacggcacccaccagccaccacaagtgtgcctggacaccgaccgccagcacgtagaacttaccgataaagcccagcgtcatcgggataccggccagagacagcatcatcaccgtcatcactgccgcgaggatcggacgatgccagaacagaccgcggtaagagaacagggaatcagcatccgggccacgatacgggctggacatcaggctgaccacgccgaacgcgccgaggctgctgaacagataaccggccaggtaaacccctaccgcttccatcgacatctcgccggtttgcagcgcaatcagcgctaccagcagatagccgaggtgagagatagatgagtaaccgagcagacgtttgatattggtctggctcagcgccatcaggttaccgaagatgatggaggcaaaggcgataatcgccagcaccacgcgaatcgcttcgctgtcacccaccggtgcgtagaggaacagacgcatcaccacaccgaagatagcgattttgctcgccgtcgccaggaaagtggaaaccggcgcaggcgcgccctggtatacgtctggcgtccacaggtggaacggcaccagagagagtttgaagccgaggccaacaatcatcaggccgaaacctgccagcaacagcggctcgttgagcataccgtcgccaaggtttttacccaacgcgacaaacgacaggtcgccagactgcgcatacaccagcgccataccaaacagcaggaaagaagacgctgcggcagaaaggatggtgtatttgatactggcttccagtgaacgtttctggcggaaagcgtaaccgaccaggccaaacagcggcaaagagatcagttcgataccgaggaacagagacgccagatggttggcattcgccagcaggatcccgcccagcgcggcaattaacaccaacaggtagaactcatccttgttgtcgttatagccttcaagccacgggtaggcgaaagtacaggtggcgaggctcgccaacaataccagcccggtgtaaagcatggcgaaaccatcaacgcgcatcagcggcgtaacgtccatagcgcccgcctggccaacaaaccagagcgaaaccagcgccgcgttaagcccaataaccgagagcgtagcgttgaggaaatgattgcgtcgccacgcaatggagagcatcacaaccaccaccgtcaagccgacgatcagcaacggtagcagtgcgatcaggttttgtggagttattgtcatggcgatttacggccttgtagtagtaacggaattaacaaaccactgctggatattgccaatcgcggagtgcgaggtatccagaatcggctgcggatagaagcccagcagtaccagcagcaccaccagcaacaggatcataaacagctcacgcagcgacatccctggcagttcctggctggcaatctggcttttcgctttaccgaagtaagcgcgatgtaacatcgccagcgaataaacagatgcaaagaccagcccaaaggtagagataacggtaatcaccggtacaacctggaagctgccgaacagaatcataaattcgccgacgaagttaccggtgccaggcatcccaagcgttgccaccgcaaagaacagcgacagtgctggcagccatttcatcttgctccacagaccgcccatcatgcgcatgtcgcgggtatggatacgttcataaagctgaccacaaagaataaacagacccgccgccgacaaaccgtgcgcaatcatctggattaccgcgccctggtaggccaactggctgccggtgtagatagcaatcagcacgaagcccatgtgggaaaccgaggtgtaggcgatcagacgtttgatatcggtctgggcgaaggccatccacgcaccgtagaagatgccgataacacccagccacatagcaattggcgcgaactctgccgacgcgttcgggaacagcggcagggagaaacgcagcaaaccgtaagcggcagttttcagcaagatccccgcgaggtcaacggaaccggcggtcggagcctgggagtgcgcatccggcagccagccatgcagcggaaccaccggcattttgactgcgaaggcgatgaagaagcccagcattaacaggtattccacaccactggacattggcgtattcagcagctcttcatagttgaaggtccagacgccggtcgcattgtagtgaacaaaaaccagcgccaggatggcaatcaacatcaccaggccactcgcctgggtgtaaatgaagaacttggttgccgccgtgatacgcgttttaccgtcagaggctttatgcccccacagtgcgatcaggaagtacatcggcaccagcatcatttcccagaagaagaagaacaggaacatgtcgatggcaaggaacacgccgataacgccgcccaggatccacatcaggttgaggtggaagaagccctgatatttttcgatctctttccacgaacatagtaccgccagcacaccgagcagaccggtcagcacgaccatcagcagcgacagcccgtcaatggcgagatgaatagagataccaaaacgcgggatccacggcatgtcgaattcagactgccactgcggaattccggcggattgcgtcagtgaataaccgccctgcaaccacagttgcagcgacagcgccagcgtcaatcccatggtgatcagcgcgatccagcgtggcaccttgacgccaaagcgttcggtctgccagcacaggaagccgccaataaagggaattaatattagccagggtagtaacatggcgatctttattccttgtaaaagtcccgtcaggaccggattttcaacgaattctcacgacagaaaattctcttcggactgggggtagtgtcggatgcaccgcgaaggcggcttatccgacctacgttcttatatgcccaggggcaatcccacaatccttaactcaacgcagtaccatcaacagtgccagcaccacgaccgcaccgatgctcatggatgccacataccagcgcagatagccgttctcacttaacagcagacctttacctgcaaagcgggaaaggacagccgggatgttcatcattgagttcagcggatcgcgtttcagcaaccaggcaatacccaggaacggcttgacgaacactttgtcatacagccagtcaaatccccaggcgttgtaccaccaggtgcccagcagacggcccggcgcactgttggcgatggaggtcaccagagtacgtttacccagccacagccaggctgccagcagaatgccgaccaccgcgaccacgccagaggtaatttccagggtcaacatgctgccgtgcgccagttccgtcgtttgcggaagcacgccctgcagcggcggtacaatcagtgcgccaacgaaggtggaaaggatcagcagcacaatcagcggcaggctgtgagttacccctttcacggcgtgagcgtgaatttgttcttttccgtggaagacgatgaaaatcatacggaaggtgtagagcgaggtcataaacgcaccgaccagacctgccaccatcagattgatatgaccattcgccatcgcacccgcgaggatctcatccttactgaagaagcccgcagtgaccagcggtagtgccgacagtgctgcgccgcccaccaggaagcagagataaaccagcggaatagatttacgcagaccgcccatcttgaagatgttctgttcgtgatggcaggccagaatgacggaaccggatgccaggaacagcagcgctttaaagaacgcgtgggtcatcaagtggaaaatcgccgcatcccatgcctgcacgccaagcgcgaggaacatgtagccaatctggctcatggtagagtaagcgagaacacgtttgatgtcggtctgtaccagcgcggcaaaaccggccagcagcagcgtaaccgccccgacaatacccaccagatgcagaacttccggcgtcatcaggaacaggccgtgggtacgggcgatcaggtagacacccgcggttaccatggttgcggcgtggatcagcgcggagacaggcgtcgggcccgccatcgcgtcggcaagccatgtctgcaacggcaactgcgcagatttaccgaccgcaccgcccagcagcatcagcgtcgcccacatcagcatgttattgccgtcagcaaagtgcgctggtgccagttccaccatttcgcggaagttcagggtgcccagttcgttgtaaagaatgaacagtgcgaaagcgaggaacacgtcacccacacgggtcacgacgaacgctttcattgccgctgcgccattcttcggatcggtgtaatagaacccgatcagcagataggagcacaggcccacgccttcccagccgaggtacatcagcagcaggttgtcggcaagcaccagaaccaccatgctggcgatgaacaggttggtgtaagcgaagaagcgagagtagccctcttcaccgcgcatataccaggaggcgtacatgtgaataaggaaacccacaccagtgaccaccgagagcatggtcagcgacaggccgtccagcaccaggttaaaaccgatgttaaagtcgcctaccgacatccacgtccacagcggctggctgtatgtctgctcgccgttagcgaagaaatcaacgccgataaaggcggttaccagcgccgccaggcccacagagcctacgccgacgatcgccgagacgttttcagaccagcgcccacgggagaatgccagcaggacgaagccaatcaatggcaaaataatggttaaggcaagcatgttcatccgcgcatctcacttactgaatcgatgttcaggttctggcgacgacggtgaagttgcagcagcagcgcaaggccgatactcgcttctgccgccgcgaggctgatggcgagaatgtacatcacctgaccgtcggtctggccccagtagcttccggcgaccacgaaggccagcgcggaggcgttaatcatgatttccagaccaatcaacataaacagcagattgcgacggataaccagaccggttaagccaagaacgaataagattgccgcgaggatcagtccatgttgtaaggggatcatgcgtgctcctccgtttttcttttcgcgctgtcgtctttacgattgctcagcacttcacccgcacgctcttcacgaccgacgtggaaggccacaaccagacctgcgagcagcagcatagaagccagttccaccgccagtacgtaaggcccgaacagcgtaatacccactgctttagcactgattggcgtaccgtcgataccctgatcgttaacaccgaggatggcgtaaacaatcaccaccagcatgatggccgacaaaattgccggaccaatccacacctgcggtttcagccactggcgttcctgttcgatttctgaaccgcccaggttgagcatcatcaccacgaacacgaacagcaccataatggcacccgcgtagacgataatttccagcgcaccggcgaagtaagcgcccagtgagaagaacaccccggaaatcgccagcagcgaaataatcaggtacagcagtgcgtgtaccggattggtatgggtgatcactcgcaaggtcgcaagtatggctatcaggccacagatataaaaagcgaactccattgcccctctccttacggtaacaggctcttgacgtcgataggcttggcttcgttctctgcttcgcccttatctttgccgtcgattgccatacctgccatccggtagaagttatattccgggtatttgcccggaccggagatcagcagatcctctttctcgtaaaccagatcctggcgcttgtattcccccatttcgaaatccggggttaactgaatcgccgtggtcggacaggcttcttcgcacagaccacagaaaatgcagcgtgagaagttgatgcggaaaaattccgggtaccagcgaccgtctttggtttctgctttttgcagcgagatacagccgaccgggcaggctaccgcgcagaggttacaggctacgcaacgctcttcgccgtccgggtcgcgggtcagaacgatacgaccacgataacggggcggcagatagaccggctcttccgggtacattcgcgtttcgcgtttggcgaacgcgtgcaggccgatcatccagatactacgaacctgggtgccgaaacctactaacaattcttttaaggtcatggtcttattgccccttattgcgcctgccagagaatgacagccgccgttaccagcaagttgatcagcgtcagcggcaggcagattttccagccgaaggacattacctggtcataacgcggacgcggtaacgacgcacgaatcaaaatgaacatcatcataaagaacgcggttttcagcgcgaaccagatgaatggcggtaacaacgggccttgccagccaccgaagaacagcgtcaccatcaatgcagagatggtcacaatcccgatgtactcacccacgaagaacagaccgaacttcataccggaatattcaatgtggtaaccatccgccagttcctgctcggcttccggctggtcaaacgggtgacggtgacataccgccacgcccgcgatggcaaaggtaataaaaccaaagaattgcgggataacgttccacacatgcgcctggctgttgacgatgtcggtcatgttgaatgaaccggcctgcgccaccacgcccatcaaggaaagcccgaggaacacttcgtagctcagggtctgcgcagaagcacgcatcgcacccagcaacgagtatttgttgttacttgaccagcccgcaaacagcaccgcgtaaaccgccagacctgccatcatcaggaagaacaaaatcccgatgttcaggtcggcaaccacccaacccggactgactggcacaatcgcaaaggccagcagcagcgaggtaaaggcaatcatcggtgccagggtaaagatgacgcgatccgagaatttcgggatccagtcttctttaaagaacattttgatcatgtccgcaaccagctggagcgaaccgccccagccaacacggttaggtccgtaacggttctggaacagacccagcaggcgacgttcgccaaagctcatgaatgccccgcaggtgacaaccaccagcaggatcaccaccgctttgaggatggtcagcaggatctcaatcagttccggtgatatccaactcattgttgtgcctccttgagatcctcaagatgcgcgccagccagcaccggagcaatgccggacatacccatcggcaagcccacctgccctgccgtcagtccttcggcgatttcaaccggcagcgtgaccgtgttgccatcgtaactaaaggagacgcgtgtacctgcgttcacacccaacttcgcggcatccgctgggttgagtttgatgtacggctgcggcatacggctctggaagaccggagcacgctgtgacaattcatcgctgccaaacaggtggtaatacggcgcgatacgccatttcccgtcctgcggctggaagcgtgccggtacgctggtgaagtaatccagaccattttcgctggtttcaaacagacgcacgcccggatcgccaaagcgcagtttgccgcccacttcgtcctggaatttgttccacgcctgcggggagttccagcccggcgcccaggcaaacggcacttgcgaacggtgcgcagtcggctggttgttaccttccatcgagaaggtgaacatggtgtcaatatcctgcggctgacgcggctcatgaacgctgatattggcgcgcatggcggtacgaccgctgtaacggtgcggttcacgggccagtttctgcccacgaatacggaatgtcgcatccggcgcagcatctttgatacctgccagttccgggattttcgccacaacagcgtcaatcacatggtcgagctgcgtccagtccacttcacggctcagcagggtgctgtgcagcgagtgtaaccagcgccagctttccagcatgacagttttgctgtcgtaataagcaggatcgtaaacctggaagaaacgttgggcgcggccttcgttgttgatcaccgtaccgtcgctttcagcaaagctggcagcagaaagtaccagatgggcgttttccataatcgctgtgcgttgatgatcaaccaccatcaccagcggtgctttagccagcgcagcattcacgcggatagcagaagcgtgacgatgcagatcgttttccaacaccaccaccgcgtcggcgcgtccggtttccagttcggttaacgcttcttcaagcgaaccgccacccataatgcccagccccatgctgttgacggaacgggcaatcatggtgataccgacgtcagcgccgcgacctttcagggctttcgcgacgttagccgccgcctgaatcacctctaagctaccggcgttcgtcccggagataatcaacggtttcttcgcacctgccagtgcctgcacgatgacgtcgattttgctttgcagctcaggttcgataccgtcaaccgctggtgcagagttatccagcgcatgggcgatggcaaaacctaaacgcgcctgatcttcaaccggtgcgcggtaagtccacgccgcgatatcatccagacgggtgtcatcaacgttggtaacaaacagcggatgcttcgcacgttgaccgatgttgaggattgccgcaatctgccagtcagccactttctgtgctgccgccatttcgcgcgctttacctttcacagcctgacgcactgccagcgcgacgcgcgcgccggtctgggtaacgtcttcgcccagcaccagtaccgcatcgtaagattcgatttcgcgcagagccggagtataaatgccgccttcacgcagcactttcagcgccagttgcagacgttcctgctcaccgtgagcgataccggtgtagaagttttcttcgcccaccagttcacgcagcgcaaagttgctttccacgctggcacgcggagaaccaataccgatcactttcttcgactgacgcagaatatctgccgcgccctgcattgcctgttcggcgttgagggtaatgaaatcatcgccacgacgctgtactggctgacgcggacgatccttcaggttgacgtaaccgtaaccgaaacgaccacggtcgcagaggaagtagtggtttaccgtaccgttgtaacggttttcgatacgacgcagttcgccgtaacgttcaccggggctgatgttacagccgatggaacattgctggcagatgctcggcgcaaactgcatatcccatttacggttgtaacgctcggagtgcgttttgtcggtaaatacgccggtcgggcaaatttcgaccaggttaccggaaaattcgctttccagcgtgccgtcttccgggcgaccgaagtagacgttgtcgtgcgcaccgtaaacgcccagatctgtaccgtcagcgtaatctttgtagtaacgcacacagcggtagcaggcgatgcagcggttcatttcgtgagagatgaatggccccaaatcctgattacggtgggtacgtttggtgaaacggtagcgacggaagctgtgtccggtcatcacagtcatatcctgaagatggcagttaccgccctcttcacataccggacagtcgtgcgggtggttggtcatcaaccactcgaccacgctttcacggaactgtttcgcttcttcgtcgtcaatggaaataaaggtgccatcggaagccggtgtcatacaggacatcaccaggcgaccacgcgtgtcttccgcgttttggtattgcttcaccgcacactggcggcaagcaccgacacttcccagcgccggatgccagcaaaagtaaggaatatcaaggcccagagacagacaagcttccagcaggttgtccgctccgttgacctcgtattctttgccgtctacatgaattgtagccattagcatgcttccagttttctcagtcagagactgagcgttaatcgaaattcggttaccagcgctctttcagcaggttcggctgaatcccattaatcaaatgggtattgctgaacggctgtttgattcccgcctcaaattcttcgcggaaatatttgatggcgctctgtaacggctccactgcaccaggtgcgtgggcacagaaagttttacccgggcctaagaatcgacacagttgctcaagtgtttcgatatcgcccggctgaccttcaccacgctccagcgcacgcagaattttcacgctccacggcagaccgtcgcggcacggcgtacaccagccgcaggactcacgggcgaaaaactcttccaggttacgcaccagcgacaccatgttgatctcatggtcaaccgccatcgccagcgccgtacccagacggctgcccgctttaccgatactttcgaattccatcggcagatcaaggtgcgcttcggtcaggaagtcagtccccgcgccgcctggctgccaggctttaaatttcagaccatcacgcataccaccggcgtaatcttcgaggatctcgcgtgcggtggtgccgaacggcagttcccacagtcccggatttttcacccgaccggagaagcccatcagcttggtgccagcatctttacttttcgagatgttctgataccactccacgccgttagcgaggatcgccggaacgttacacagggtttcgacgttgttgacacaggtcggtttaccccatgcgccggaggttgccgggaagggtggcttcgagcgtgggttagcacgacgtccttccagggagttgattaacgctgtttcttccccgcagatgtagcgccctgccccggtatggacgaacagttcgaaatcgaaacctgttcccataatgtttttgccaagcagacccgcttcggtggcttcggcaatggcacggcgcagattaactgccgcttcgatatattcgccacgcaggaagatgtagccacggtaagctttcagcgcaaacgcggagatgagcataccttccaccagcaggtgcggcagttgctccatcaacaggcggtctttataggtgcccggctccatttcatcggcattacacagcaggtaacggatgttcatggattcgtctttcggcatcaggctccatttcaggccagtcgagaagcccgcgccgccgcgccctttcagaccagcgtcttttacctgattaacgatttcgtccggagacagcccggtcagcgccttacgcgcgccttcgtaaccgtttttgctgcggtattcgtccagccacactggctgtttgtcatcgcgcagacgccaggtcagcggatgcgtttcgggagtacggataatgtttttcatttataccgctccagcagttcagggatcgcttccggggtcagatgcgcgtgagtgtcctcatcgatcatcatgtttggccctttatcacagttccccaggcagcaagttggcagcagcgtaaagcggccatcaaatgtcgtttgccctggtttgatgttcagctttttctcgagcgccgcctgaataccctgataaccgttgatatgacagaccacgctgtcacaataacggatcacatggcgaccaaccggctggcggaagatctgactgtagaacgttgccacaccttcgacgtcgcttgccggaatacccagcacatcggcgatcgcgtggatcgcaccatccggcacccagccacgctgcttctgaacgattttcagcgcttcaatggacgccgcacgcgggtcttcgtagtggtgcatctcgtgctcgatcgcttcacgctctgccgcactcagctcaaaagcctcggtttgtggttgttgattctcgtgcataattagcggtccacatctgacataacaaaatcgatactgcccagataaacaatcaggtcagacaccaggctgccgcggatcgccgccggaatttgctgcaaatgcgcaaagctcggggtacgaacacgggtgcggtaactcatggtgctgccgtcgctggtcaggtagtaactgttgatccctttggtcgcctcaatcatctggaaagattcattggcaggcatcaccggaccccacgacacttgcaggaagtgggtgatcagggtttcgatatgttgcagcgtgcgctctttcggcggcggcgtggtcagcgggtgatccgctttgaacgggccttccggcatgttgttgaggcactgctcaagaatgcgcagactctggcgcagctcttccactttaagcattacgcgggtgtagcagtcagaaacgccaccacccaccgggatttcaaagtcgaagttttcatagccagaataaggacgcgccttacgcacgtcgaagtcgatcccggtagcacgcaggcccgcgccagtggtgccccactccagcgcctctttcgcgccataggcggcaacgccctgggaacgacctttcagaatggtgttttgcagcgccgctttctcgtaagacgccagacgtttcggcatccagtcgaggaactcacgcagcaggcgatcccagccgcgcggcaggtcgtgcgctacgccgccaatacggaaccacgccgggtgcatacggaaaccagtgattgcttccaccagatcgtaaattttctgacgatcggtaaaggcgaagaacactggcgtcattgcgccgacgtcctgaataaaggtcgagatatacagcaggtgactgttgatgcggaacagttcggagagcataacgcgaatgacgttaacgcgatccggcacggtgatcccggccagtttctctaccgccagcacgtaaggcatttcgttaacgcagccgccgaggtattcgatacggtcagtatacggaatgtagctgtgccaggactggcgttcgcccattttctccgcaccacggtggtggtaaccgatgtctggtacgcagtcgacaatctcttcgccatcgagttgcaaaacgatacggaaagccccgtgcgccgacgggtggttcggaccgaggttgaggaacatgaagtcctcgttttcggtgccgcgcttcatcccccactcttccggtttgaaggtcagggcttccatctccagatcctgtttggctttggtcagctcaaacggcgagaattcggtagcgcgcgccggataatctttacgcagcgggtgacctttccaggtttgcggcatcatgatgcgtcgcaggttcgggtgaccgtcgaaagtaatgccaaacagatcccaggtttcacgctcataccagttagcgttcgggaacagtttggtgaaggtcggtacgtgcaggtcgttttctgccagcgccaccttcagcatgatgtcgcggttacgatcgatagaaatcagatggtagaaaacggaaaaatccgcggcaggtaacccttcgcggtgtgtgcgcagacgttcgtccatgccgtgtaagtcaaacagcatgacgtaaggtttcggcagtttctttaagaaatcgccaacttccagtaattgttcacgcttgatccacacaacgggaaccccggtgcgagtcgcctgaacagtaaaggcatccggcccaaaacggttgcgcagttcgccaatcaccggatcatcaagatgatcgcgggtctgccaggcgggttcttgcgcggttaagtcggtcatattgttcaccattgcaaatggtccgtggtgactgtcggcgcagtaagcttcgcgaaatagatttaggaataagcgaagaaaaatccctttgccgacaggcgcaaattaaatctcgtcaggtgtacgcaggttagttacggcaatgcgttcaccgcgcttgcgttcgcgctctgattgcatattggcgcgataaacgccctgatcgccaaccacccaggagagcggacgacgttctttgccgatagattcctgcaacagcatcagtgcctgcatgtacgcttcaggacgcggcgggcagcccgggatatacacatcaaccgggatgaatttatcgacgccctgcacaacggaataaatatcgtacataccaccagagttggcacaggcacccattgagataacccattttggttccagcatctggtcatacagacgctgaataaccggtgccattttggtaaagcaggttcctgcaaccaccatcaggtcagcctgacgcggcgaagcacgcaatacttctgcgccaaaacgcgccacgtcatgcaccgcggtaaacgaagtcaccatctcaacgtaacagcaggaaagaccgaagttatacggccaaattgagtttttacgaccccagttaaccatgtcattgagcttgcccataaacacgtttttgttaacttcttgctccagagggtcggttacgatctcctgcttttgcagggggtaacggtcgttctcaccgttgggatctatgcgggtgagcgtataatccatcttaatgcctcgcggttagcgttgacgattagcgatactgttcgtttccgggttcatacgctcgcggcgtgaacgcgcgggcgtccagtccagcgcgccaatacgcaccagataaaccagacctgccagtaacacaaaaataaaaattgcagcttccacaaagcctacccagccgctttcgcggatagaggttgaccatgcgaacagatacagcgcttcaacgtcgaagataacgaagaacatggccaccagataaaacttggcggacaggcgtaagcgggcggagccgaccgagtcgataccggattcaaacggcacgtttttcgacctcgcgcgtgcgcgaccgcctaaaaaccaaccgcctaccagcatcaggcaacacaggccaatggcaacgataagaaagatagcgaatgcccagtgatgagcgatgacttcagtggatgttgacatactcattgcttactcatcaaaagtagcgccagattcactgctcttcacggcagatggacgccacatcgattcatggggaggaataaaaaaaaccttacaatcactgtagaaattcttttatacagctaattgatgtggttttttactcctttctataaccttttgtcaactttaacaaaagtttcttcacattagtttacataatatcaacaccattagcatttaatgccctttcaccccagatccttgacgactccaggataattagatgttgttgaatcgtgtccgttgtgaagcaatggaaaaaatacgggtctattttgacaggaatttgtgtcgattcctccccccaaaagagagtattttcttgatctgtgacacgcttttgtcattccataacaaaaacgcagcaacaaatttacgtattttttaacatcattgtagcaggtgatttttttcaggcgattatttgtgcgttcgggacgtgaatctctggtggttgaaaaatgaacagttttgtacgttctgcactatgcgatgaaggatttttactaaaaaaaagccgctggggtttaaaacacccccagcggctcgttttttacactattgtctcaggaattatctatcgtccgtcgattactcgatatccctttcaatcaacaatgaatcatccccttccggagcagacattgggctgtattgccacggattatggtagctctccatcgcctgatagatcacctgggccagctcattattactggacggatcatagcacagcaaatattcggtatcaggtagcggcggtaagccatctactccactcagcacacgcaggtccgggctcatcatctcaaccggccttgccgtcacgccaagaccggctttcactgccgcacgaacggccggaagcgtcgaggcgacataagccagtcgccatggaatatctgctttattaagcgtcgccagcaccatatcgcgaaacgggctaggatcatccagcaatacaagagggatcggctcgcctttttgcaatatgtattccgctgcgcagtaccagtgtgttggcgaggtacgcaggttcaatgccttaaacgctgaaggacgatgggtggttaccatcaaatccacttcctgggattccagcatttctgccatataggcattacgtttaacgcggacatccagcgctaatttcggataaaccgaactcacgcgatttaacaggaaaggtaagatcgtatcggcagattcatctgaagcaccgatagttaatacgccctgaagattactgaacattaatgatgagcaggcctcatcattaaaacgcaggattttcctggcgtaaccaagaagttgaatgccatgttcagttaacagtttgttgcgaccgtgacgagcgaacagttctttcccaacgagttgttccagacgctgcatttgctgacttacggcggactgagtacgacacacagcggcagctgcggcagcaaaagtgttcagatcggcaacagcaacaaatgttctcagcagatcgaggtcgaggttaattatcggacgatttgcacttatcatatattatcacttactggcggctcatactgagctggttaatgctgtgcacacacaaacaagcaattccatttgtaatgtgcctccctggcagtttcatccggaacccggacgaaagtaaaaatgcatatgagttgcactaaaaaagcgactcacattgttccgttataatgcctgaagtagatcacagaatatatcttcagggatcgcatatctattaagttactcactcttttctatttatgacatgcgcgtgtttgtataaatgtaaatgtgagtccttgttccactctcgtgcagcatcgctggtcatacgcgaacacgtaccaacagcaatggtgaggcggcatcaagagcagggatccgtcatttatccgagcattttaccccaaaaaccttttatttataagggtcattgcgaattatctgatgcaaagttatgttatgttaggcaaagtaatcttctattattaataagcacatcaaaacctttttgaatattaaataataattaattagcatcatcctcattcattaattccgcttaacaatagtttcacaccttgcccccattgcgacacctcggaaatcatcacgcagttaaactctccgtaatgaggaaatatcatcatcgcgtttcattagtgaattcttaaatgaggcattttcacacaattatcttacagataaaaaaaccagacttacaattaagaatcagaacaattcactatataacattgcatgtaaagcatatacacctcattattttgtcattattaagttattaacagcacaatcgagccttcccctctggcaaaatcttattctgcagaccttcaaaacaccgtcctgggggagtacattgttctaagctgacttccacggcagggagtggcgataacagcaaaaaaggtcaagattcatgtcccccattgaaaaatccagcaaattagagaatgtctgttatgacatccgtggtccggtgctgaaagaagcaaaacgcctggaagaagaaggtaacaaggtactgaaactgaacatcggcaacccagccccgttcggttttgacgcgccagatgaaatcctcgttgacgtgatacgcaacctgcctaccgctcaagggtattgcgattccaaaggtctttactccgcgcgtaaagccatcatgcagcactaccaggctcgtggcatgcgtgatgttaccgtggaagatatttacatcggcaatggtgtatcggagcttatcgttcaggcaatgcaggcattgctgaacagcggggacgaaatgttggttcctgcaccagattacccactctggaccgcggcggtttcgctttccagcggtaaagcggtgcattatctttgcgatgaatcctctgactggttcccggacctcgatgatattcgcgctaaaattacgcctcgtacgcgtgggatcgttattatcaacccaaataacccaaccggcgcggtatattccaaagagcttttaatggagattgtggagattgcacgtcagcataatctcattatcttcgccgatgaaatttatgacaaaattctctacgacgacgctgagcatcactcaattgcgccgctggcacctgacctgctgaccattacctttaacggactgtcgaaaacgtaccgcgttgcaggcttccgtcaggggtggatggtgttgaacgggccgaaaaaacacgccaaaggctacatcgaaggtctggaaatgctggcttcaatgcgcctgtgtgctaacgttcctgcgcaacacgccattcagaccgcgctaggtggttatcagagcatcagtgaatttattacccctggcggtcgtctttatgagcagcgtaaccgcgcgtgggaactgatcaacgatattccgggcgtttcctgcgtgaaacctcgtggtgcgctgtatatgttcccgaaaatcgacgccaaacgctttaacattcacgacgatcagaaaatggtgttggatttcctgttgcaggaaaaagttctgttggtgcaagggacggcattcaactggccgtggccggatcacttccgcattgtcacgctaccgcgtgtcgatgatatcgagctgtctttgagcaagttcgcgcgtttcctttctggttatcatcagctgtaatcttaatttcactgccggagattgcatccggcagcgttatcccgccacaatgacctgatgatgtcatcatacgtaaggtcactatgaaacagagccatttttttgcccatctctcccgcctgaaactcattaaccgctggccgctcatgcgcaacgtgcggacggaaaatgtgtccgaacacagtttgcaggtagcgatggtcgcccatgcgctggcagctatcaaaaatcgaaaatttggcggtaatgtcaacgccgaacgtatcgctttactggcgatgtaccacgatgcctcagaagtgctcaccggcgatctccctactccggtgaaatacttcaattcgcaaatcgctcaggagtacaaggctattgaaaaaatcgctcagcaaaaactggtcgatatggttccggaagagctgcgggatatctttgcgccgttaattgacgagcatgcatatagcgatgaagaaaaatcgctggtgaaacaggcagatgcactgtgtgcatatctgaaatgtctggaagaactcgcggccggaaataatgaattcttgctggcaaaaacgcgactggaagcgacgcttgaagcgcgtcgcagccaggagatggactacttcatggaaatatttgttcccagcttccatctttcgctcgatgagattagccaggattcaccgctgtaagcagccggagtctgcgtcgcatcaggcaataagcgccggatgcgacatcaggctcttgtcaaaacggaaacagcatcgggatcatcaccacacaaaccgccatcacgataatggtgaacggtacccccaacttcacaaagtcactgaagctgtaatttcccggacctaaaaccagtgtgttaacaggtgaagaaaccggtgtcataaaggcggcggatgctgccatcgccacgaccatcgcgaatggataaggcgacacccccatcgttttggcagcagccagcgcaatcggagccatcaacaccgccgtcgcggtattagagataaatagcccaataaccgccgacaagacaaacaaacaccccagcatcatatgtggcccgtaaccaccgccaatgtccatcagccctttcaccgccagcgcgacacctcccgttttctgtaatgccacagcaaacggcatcatcccaacgatcaaaataatgctcggccagtgaatggatttataggcgctttcagcatctatacagcggaatttccccatcagcaggcaggcgatgatagcggcaacaggattaggaatttcatctgtcagcattaacgccaccattagcaccagacagaaaatggcatggggtgcctggctgtgcgcgggtgatgcttcactcacctcttccggtaagttcagcgctacgaagtcgcggccctgtttggccagcataccgatcagtttccagttacccacaaccaggatgatatcgcccagcagcagaggctcatccgccagcgaaccttccagcgccacgccattgcgctttagccccaccacattcagtccgtagcgggtacgaaaaccaatttcgcgcaccgatttaccaatcagttctgactcaggaattaatgaaatctctgccatgcccacatcaagggcctggtcagaaaaatactcgccgcgcaataccatcggctccagcaattgctcactacaaaattgccggagatcgacatcagccgcagacatatcaataagcaaaacgtcacgcgcgcgaaattcagaaaccccattaacgttcacgataacgcgacgaaaacgccgccagcgttcaacaccgatgacgttagcgccataacgctcacgtaatttgagatcatccagccgttgaccaatcattggcgatccggggcgaatagccagacgtcgcgcacgcccggtcagtcgatattcacggataagatcgcgaaaggttcgacgcgtccagccttcgcgctgcggggtctgggtatcccctttcagcatgaaacgcatcactaacatatacaaaatacccagcaccagcacgaccaggccaataggtgttacgctaaagaaactgaagccgtgatagccttcacgcagcaattcactgttgactaccaggttcggcggcgtcgccaccagcgtcatcatgccgctaatcagcccggcaaaacttaacggcatcatcagacgtgacggcgacgtttgcatacgcatggcaacgcttaacaccacgggaataaagatagcgacaacgccggttgaactcataaacgcgccaagccccgcgacggtcagcatcaacaaaaccaacattttgatttcactattgcccgcaactttgaccagccatgttcccattacggtggcaacaccggtacggaccaaaccatcgccaataataaacaaggcggcaatcaggacaacgttaggatcagaaaagccggaaaatacttctgggactgtcagcgttccgcttaatgcaaacgcgacaataacaaacaaagcgaccgcatccatacgcactctgcccgtcgcaaacaagacgatggcaacggccagtaatgaaagaacccaaatcaattcaccgttcacaacttatccttgttaattgagggggatgacttgattctgccataaaaaagccccgacgagacggggctaaatcatgatcaggtgtttcactgaataataacatcgccatttggctgtttggtcacagtaatttgctccagactgtggaggaccaaatcgacctcattcaggcgcggggtatctgccggagcgttaaccgcaatgacatgacaacccgccgccaggccagaaagcacgccagcgggagcatcttccaccaccacacactcctgcggcgcaagccccagcagctgcgcgcctaacagatacgcatcaggttctggttttccgcgcttcactcgctcagcggttacaaacacctctggtgcgggaagcccagctattttatggcgcgctcgcgctaccggcatggagccagaagtcacaatggcccacggaatacctgctttattcaaatgactgagtaaggcgattgcccccggaagcgcggtaataccttcggtttccgtggcctcgatgtgctccagacgcgtaaactcggcggcaatatcagcctcggatttgcccgccataaaatggcgcagagaggtgatcgcctgtttaccgtgaatgaaagccagcacctcttccggcgctaacccatgacgtctggcccagttgctccacgcccgttctaccgcaggcagggaatccaccagcgttccatcaagatcaaacagaaaacctttgcaccgcacgcgggcctcctcaggcattgataatttgattaatttcgttggcgctcaaatggtactgacgcgggcaggcatgccacacattaagcatgcgctgatatttttcccacattggcgtctgggcgttaaaaccgtgagttccggcgtcaaaatgggtatagcgcccttccacattaaccataaagcggacataaccgaggtaacgtgcttcagtggcggcgtcaaagccgaggaaggtgacacgacgttcatcgatggattgctggtcctgcaaattagaccaggaaacatgcaacgcatgatacatctccataatgtcgatgatagtgcggcaggtttcttctttcagctcgccaaactcgcgatccaattcacgcatctgtaatccgtaaccacgctcaataattgtttgcaggcgacggtaacgttcagcatttgccggatcgagcatagtcatcatcttgtactgattagacaaaataagacgttgcgcgttggtcatttccattgttgactcctgtatcactctactacggtgaaaaaaaagaaggctgagtatgccttcttttatatgcgtaatcaggggtcaattacaaatcatcaaggaaagttttatccagttgtttgaaggcgcgcttaagcgtgtcagctaatgcctggtaatcaggcttgccttcaacgggtgccaacacctgtccagactcctgcaatttaccgcgaacttcataaaaccagttaaggattgcagggggtaatggcgtgacagaacgcttgcccagccaccacaatccctgcatgggtaaacttaaggcgaacagggcagtggcaactgccggcccaagctgaccgcccagggcaatctgccagcagagagtaaatacggcgatcggcggcataaaacggatcgcataacgcgtcatcttgataacgcgattttcgacaaagaccggggcaaggcgtttttccagcggccacgtctttgagtaatgctgtccccggcgaaacaagctaaaaaaattaacagaacgattatccggcgttgacatgcttcacctcaacttcacatataaagattcaaaaatttgtgcaaattcacaactcagcgggacaacgttcaaaacattttgtcttccatacccactatcaggtatcctttagcagcctgaaggcctaagtagtacatattcattgagtcgtcaaattcatatacattatgccattggctgaaaattacgcaaaatggcatagactcaagatatttcttccatcatgcaaaaaaaatttgcagtgcatgatgttaatcataaatgtcggtgtcatcatgcgctacgctctatggctccctgacgtttttttagccacgtatcaattataggtacttccatgtcgagtaagttagtactggttctgaactgcggtagttcttcactgaaatttgccatcatcgatgcagtaaatggtgaagagtacctttctggtttagccgaatgtttccacctgcccgaagcacgtatcaaatggaaaatggacggcaataaacaggaagcggctttaggtgcaggcgccgctcacagcgaagcgctcaactttatcgttaatactattctggcacaaaaaccagaactgtctgcgcagctgactgctatcggtcaccgtatcgtacacggcggcgaaaagtataccagctccgtagtgatcgatgagtctgttattcagggtatcaaagatgcagcttcttttgcaccgctgcacaacccggctcacctgatcggtatcgaagaagctctgaaatctttcccacagctgaaagacaaaaacgttgctgtatttgacaccgcgttccaccagactatgccggaagagtcttacctctacgccctgccttacaacctgtacaaagagcacggcatccgtcgttacggcgcgcacggcaccagccacttctatgtaacccaggaagcggcaaaaatgctgaacaaaccggtagaagaactgaacatcatcacctgccacctgggcaacggtggttccgtttctgctatccgcaacggtaaatgcgttgacacctctatgggcctgaccccgctggaaggtctggtcatgggtacccgttctggtgatatcgatccggcgatcatcttccacctgcacgacaccctgggcatgagcgttgacgcaatcaacaaactgctgaccaaagagtctggcctgctgggtctgaccgaagtgaccagcgactgccgctatgttgaagacaactacgcgacgaaagaagacgcgaagcgcgcaatggacgtttactgccaccgcctggcgaaatacatcggtgcctacactgcgctgatggatggtcgtctggacgctgttgtattcactggtggtatcggtgaaaatgccgcaatggttcgtgaactgtctctgggcaaactgggcgtgctgggctttgaagttgatcatgaacgcaacctggctgcacgtttcggcaaatctggtttcatcaacaaagaaggtacccgtcctgcggtggttatcccaaccaacgaagaactggttatcgcgcaagacgcgagccgcctgactgcctgatttcacaccgccagctcagctggcggtgctgttttgtaacccgccaaatcggcggtaacgaaagaggataaaccgtgtcccgtattattatgctgatccctaccggaaccagcgtcggtctgaccagcgtcagccttggcgtgatccgtgcaatggaacgcaaaggcgttcgtctgagcgttttcaaacctatcgctcagccgcgtaccggtggcgatgcgcccgatcagactacgactatcgtgcgtgcgaactcttccaccacgacggccgctgaaccgctgaaaatgagctacgttgaaggtctgctttccagcaatcagaaagatgtgctgatggaagagatcgtcgcaaactaccacgctaacaccaaagacgctgaagtcgttctggttgaaggtctggtcccgacacgtaagcaccagtttgcccagtctctgaactacgaaatcgctaaaacgctgaatgcggaaatcgtcttcgttatgtctcagggcactgacaccccggaacagctgaaagagcgtatcgaactgacccgcaacagcttcggcggtgccaaaaacaccaacatcaccggcgttatcgttaacaaactgaacgcaccggttgatgaacagggtcgtactcgcccggatctgtccgagattttcgacgactcttccaaagctaaagtaaacaatgttgatccggcgaagctgcaagaatccagcccgctgccggttctcggcgctgtgccgtggagctttgacctgatcgcgactcgtgcgatcgatatggctcgccacctgaatgcgaccatcatcaacgaaggcgacatcaatactcgccgcgttaaatccgtcactttctgcgcacgcagcattccgcacatgctggagcacttccgtgccggttctctgctggtgacttccgcagaccgtcctgacgtgctggtggccgcttgcctggcagccatgaacggcgtagaaatcggtgccctgctgctgactggcggttacgaaatggacgcgcgcatttctaaactgtgcgaacgtgctttcgctaccggcctgccggtatttatggtgaacaccaacacctggcagacctctctgagcctgcagagcttcaacctggaagttccggttgacgatcacgaacgtatcgagaaagttcaggaatacgttgctaactacatcaacgctgactggatcgaatctctgactgccacttctgagcgcagccgtcgtctgtctccgcctgcgttccgttatcagctgactgaacttgcgcgcaaagcgggcaaacgtatcgtactgccggaaggtgacgaaccgcgtaccgttaaagcagccgctatctgtgctgaacgtggtatcgcaacttgcgtactgctgggtaatccggcagagatcaaccgtgttgcagcgtctcagggtgtagaactgggtgcagggattgaaatcgttgatccagaagtggttcgcgaaagctatgttggtcgtctggtcgaactgcgtaagaacaaaggcatgaccgaaaccgttgcccgcgaacagctggaagacaacgtggtgctcggtacgctgatgctggaacaggatgaagttgatggtctggtttccggtgctgttcacactaccgcaaacaccatccgtccgccgctgcagctgatcaaaactgcaccgggcagctccctggtatcttccgtgttcttcatgctgctgccggaacaggtttacgtttacggtgactgtgcgatcaacccggatccgaccgctgaacagctggcagaaatcgcgattcagtccgctgattccgctgcggccttcggtatcgaaccgcgcgttgctatgctctcctactccaccggtacttctggtgcaggtagcgacgtagaaaaagttcgcgaagcaactcgtctggcgcaggaaaaacgtcctgacctgatgatcgacggtccgctgcagtacgacgctgcggtaatggctgacgttgcgaaatccaaagcgccgaactctccggttgcaggtcgcgctaccgtgttcatcttcccggatctgaacaccggtaacaccacctacaaagcggtacagcgttctgccgacctgatctccatcgggccgatgctgcagggtatgcgcaagccggttaacgacctgtcccgtggcgcactggttgacgatatcgtctacaccatcgcgctgactgcgattcagtctgcacagcagcagtaatctcgtcatcatccgcagctttgcgctgcggatatctgaaccggaaataatcactatttccggttttttattctcttaatttgcattaatcctttctgattatcttgcttaactgcgctgcatcaatgaattgcgccatcccactttgcatacttaccactttgttttgtgcaagggaatatttgcgctatgtccgcaatcactgaatccaaaccaacaagaagatgggcaatgcccgatacgttggtgattatcttttttgttgctattttaaccagccttgccacctgggtagttccggtggggatgtttgacagtcaggaagtgcagtatcaggttgatggtcaaacaaaaacacgcaaagtcgtagatccacactcatttcgcattctgactaacgaagcaggcgaacctgagtatcaccgcgtacagctgttcacgacgggcgatgaacgcccgggcctgatgaacttcccgtttgaaggattaacctcaggatcgaaatacgggacagccgttggcatcatcatgtttatgctggtgattggcggcgcgtttggcattgtgatgcgtacaggaaccattgataacggtatcctggcgcttattcgccatacccgcgggaatgaaattctctttattcctgcgctgtttattctgttttcacttggcggcgcggtatttggtatgggagaagaggccgtcgcctttgccattatcatcgcaccgctaatggtccggctgggctatgacagtattaccaccgtcctggtgacctatattgccacgcaaatcggttttgccagttcgtggatgaacccgttttgtgtggtcgttgctcaggggattgccggcgttccggtgctttctggctccgggttgcgcatcgtggtgtgggttatcgccactctgattggcctgatctttaccatggtgtacgcctcacgagtgaaaaagaatcctcttctgtcacgcgtgcatgagtccgaccgcttctttcgtgaaaagcaggctgatgttgaacaacgtccgtttacctttggtgactggctggtattgattgtcctgaccgccgtaatggtctgggtgatttggggcgtgatcgttaatgcctggtttattccagaaattgccagccagttcttcaccatgggtctggtgattggcatcatcggcgttgttttccgccttaacggcatgacggttaataccatggcttcatcctttaccgaaggggcgcgaatgatgatcgcccctgccctgctggtgggtttcgccaaagggattttgctgctggtcggtaatggtgaagcgggtgatgccagcgtgttaaataccatcctcaacagcattgccaatgccattagcggtctggacaacgcggtcgcggcctggtttatgttgctcttccaggcggtatttaatttcttcgtgacgtccggttctggtcaggcggcgttaaccatgccgttactggcaccgcttggcgatctggtcggtgttaaccgtcaggttaccgtgctggcgttccagtttggtgatggcttcagtcacatcatttacccaacctcagcgtcgttaatggcaacgctcggtgtgtgcagggtggacttccgtaactggctgaaggtgggcgcgaccctacttggactgctgtttattatgtccagcgtcgtagtgatcggcgctcagttgatgggctaccactaaaaatgttaagagccgcaattgcggctcttttttcattctgccgtttcagtctctacggcttcatttttggcattgcgcttcatccacaacgctagcgctttcagcgagtctggagtgaactcatcgcagcgtgcggtgatttcttccggcgtcagccagcaaacttcactgacttcatcttcctgtagtgcgaagggaccgtgagagacgcagctgaacaatgcgccccagacacggcaatttttatcttcgaaatagaactgcccgtgctcggcaaaggggacaccggcaatgcccaactcttcttccgcttcgcgacgcgcggattccagcagttgctcatcggcctggactacaccgcctgcggtcgcatctaacatgccgggtaaaaagtcttttgtctcggtacgacgctggaccagaattttgcccatgccatcatgcacgacgatgtaagttgcacgatgacgcagacactgtgcccgcatttgttcccggctggcttgtgcaatgacttcgttctcttcattgacaatatccacccattcagtacttgccaaacgacgctgttccattatcaggaaaccttctttttctggcgctcttacggcgcattttgagttgtgggtaaattacggattaatcgcgacctgcgcaatgatactttgatcattgagtgcgattacactaagtacgtcattatccagcatgccataactcgccggattaccgcctttcggaatactcaccgagccggggttgaagtggaaaatctccccccgctgttctgccactggcagatgggtatgaccgtacaccagcacatcgttctggtttaaagcaggcagattttccgggccaaaaagatgaccatgcgtcaaaaacagacgttgtttttccagtaatacctgttgccacggcgcggttatcgggaaatgcagcagcatttgatccacttcgctgtcgcagttgccgcgcacagcgataaccttatgtgccacttcattaagccgttcagcgactttggctggcgcgtaaccctccggtaaagcattacgcgggccgtgattcaacacgtcgccaaggatcaccagccactgggcaccgctttgggcaaacaactccagaacacgttccgtcgccggtaacgacccatgaatgtccgatgcaaacatcagtttcatcactcactcctcgtcgaaaaaacgtaagctatgatactggattctgtcgttgctatcagccagattgcttcgccgaaagtgcaataaaacgctggacagacgctcgctgccactggaatgttgcataatccaccaggcgttctggcacctcatcgccatgtagtaccaggcggttaatcattagcgccagatcagtatcagcaatgcaccattcaccaaataaattcggctgacccagtactaacaaatgttctgccatcgcgaacagtttctctgcactggcttttccctcggccgttagtggcgcttttttcgcccccgcaaagacaacatccgtcggacgctcttcgcggatgggcatcagatcgctgcgcagccaggcctgaatctgtcgtgcacgcgcacgattttctaaatcaagcggataaatacgttcccaggtcggtggcgcaaatcgatcttccagatactccgcaatggcagaagattcactcaactcaaaatcatcgatttgtaataacggcacacggcgtgtctgaccgtaaccttgccacgtcggctgcaaatgttcaccgctgtcgaggtcgatggtcttgatatgaaacgacaggcctttttcctgcaacgccacccaggcggataacacataaggggagaaaaagtgggcatctgaccaaagcgtgatagcgggtttactcattatgtcctcggcaataaagggggctggctatcaaactatagagcctttttgtcactgtcacgtgacgaatactcacgtaagtcgccgcgctttctatacttgtggtgttcagatgattaaacaaccggagctgcaatgatcgatctctatttcgccccgacacccaatggtcacaaaattacgctgtttctcgaagaagcagagctggattatcgcttgattaaggtagacctggggaaaggcggtcagtttcgtccggaatttttgcgcatttcgcccaacaacaaaattccggcaattgttgatcattctcctgccgatggcggcgaaccgctaagcctctttgagtctggtgccattttgttgtatctggctgagaaaacaggactctttttgagtcatgaaacgcgtgagcgcgccgccacattacagtggttattctggcaggtaggcggactggggccgatgcttgggcaaaatcatcattttaatcacgcagccccccaaaccattccttacgctattgaacgttatcaggttgaaactcagcgtctttaccatgtactgaacaagcggctggaaaactcgccctggctgggaggcgagaactacagcattgcggatattgcctgctggccgtgggttaatgcctggactcgccagcgaattgacctagcaatgtatccggcagtcaagaactggcatgagcggatccgttcgcgccctgccaccgggcaggcactgctaaaagcacaactcggtgatgagcgttcggatagttaacagaaacaggttctcgtgtattatttcatcctaagtaaaacaacggagaacctgcaatggcacaacctgccgctattattcgtataaagaaccttcgtttgcgtacgtttatcggaattaaggaagaagaaattaacaaccgtcaggatattgttatcaatgtgacgatccactaccccgccgataaagcgcgcactagcgaagatatcaacgatgcgctgaattatcgcaccgtaacgaaaaacattattcagcatgtagagaataaccgtttctctttgctggaaaaattaactcaggatgtgctcgatatcgcacgtgaacatcactgggtgacgtatgctgaagtggagatcgataaactgcacgcgctgcgctacgccgattcggtatccatgaccttaagctggcagcgttaatcgccatatcgggaggctgcatgaacatagtgatcaccggagggacaggattaattggtcgccatttgattccgcgtttgctggagctgggccatcaaattacggtagtgacgcgtaacccgcagaaagccagttccgttctcggccctcgggtgacactatggcaagggcttgccgatcaaagcaacctcaacggcgttgatgcggtaatcaacctggccggagaaccgattgctgataaacgctggactcacgagcaaaaagagcgtctctgccaaagccgctggaatatcacgcaaaaactggtcgatttgattaatgccagcgacacgccaccgtcggtactcatttccggctcggcaacgggctattatggtgacttaggtgaagtggtggttaccgaagaggaaccgccgcataacgaatttacccataaactctgcgctcgctgggaagaaattgcctgccgggcgcaaagtgacaaaacgcgagtgtgcctgctgcgtaccggtgtagtgctggcaccggatggcggtattctcggtaaaatgctgccgccgtttcgtcttggcctgggcgggccgattggctctggtcggcagtatctggcctggattcatattgatgatatggtcaacggtattctctggctgctggataacgagctgcgcgggccatttaatatggtttcgccctacccggtacgcaatgaacaatttgcccatgcgctcggtcatgcgctgcatcgcccggccattttgcgcgtccccgcgaccgccattcgactgttaatgggcgaatcttcagtactggtattaggtggacaacgcgcgctgcctaaacggctggaagaagcgggttttgcgtttcgctggtacgatttagaagaggcgctggcggatgtcgttcgctgatgtggtttacagcaaacatccgccagttaactcccggtgttacaggattagtggctttgcgcgataagatcgtctggtgaaagtcgggtcaccatcataactaactctctgtctaaacctctatccagcatctcctgagcaatacgcagggcttcttcgtgtttgccctgcattgcgccttcttcacgtaatctgtcagcaatggtcatcagtttctccttttcttgtggtgcgcgttccgctatctcaccaataaatgcacgaaaacgctgggcatcccctgtttgtaatacgtaattaaacagggcttttagctgtctgtcattagtgttccctgtaactagcagcgaaacaatttggtcgactaatcccaacagatcgcgctgacgaatatgtttctgaattaactccaacagcgccattttgcggtgttgcataatctcgtcatccggcaccacggtaatatccaccaacggaaaagccgatgaatatattttgcgggctatagcaggctcggcaaattcatcaagccagcagagtgaataaggataaggacttctgcaaccatgataaaacagcatcgggagcaccaatggaagctctttatagcccgcatcaagatggttttgcattgccgcaatggaataacgcatcatgcgaaaagccattaattcttccggcttactttggtgctctatcactacataaatataacccactccctcctgcgttttcacagaccacaagaggtcggaataatattgccgcaggtcttcatcaataaaactgtttggttccagtttaagcgtcgttaaatcacacagtttgcgcagcggcgcgggaagatgaatatcaataaaatcccgcgcggtgtctggatggcgtaaaaaagatttaaataccgcatcatgcggcgtggaagttgtcgatattgtcatggcgttccgtcacccctcaaatttaagatgacgcgacaataaccacgattaacacccaatgcagcaggcagtttttatctttggacagcgaattcagaagtatttttagcggactgtaacttttacatttcagcggaagctgactcgcaaattccccatgaaaatactccggcagcgttagccaccggagaggaaattatttcagcgatcccttaaggaaccgttgcagacgagggctttgcgggttgccaaataactgctccggcgcgccctcttcttctattttcccctgatggaggaaaatgacatgagtagaaacatggcgagcaaagcccatttcgtgagtcactaccaccatggttttcccctcttctgccagttgctgcataatacgcaacacttcgcctaccagttcaggatcgagcgccgaggtaggttcatcaaacagtaaaacttccggttccatcgccagcgcccgcgcgatagaaacacgctgttgctgaccgccggaaagatgcaccggatatttcccctgcgcacgttcgtctatcccgacttttgccagatacttcaccgcccgctcgcgcgcttcctgcttgctcaggcccaacacctgaatcggcgcttccatgacgttttccagcaccgtcatatggctccagagattgaagtgctggaataccatcgtcaggcgtgtgcgcagtaagcgcagttgatttttatcggcgactttgagttgaccgtctttgtcgcgcaccagattgatcgtctggccattgaccacgatcgacccttcactcggtttttcgaggaagttaatgcagcgcagaaaggtacttttccccgatcccgacgatccgatgatgcttattacatctccggcattcgcttgcagtgatacccctttcagcacttcatgttcgccgtagcgtttgtgcaaatcgataacgtttaatttattctcggacatcgtattctcagtgcgttgaagaaggtttcacatgctgcaaccagcgtttttccgctctgcgaaagaggctgatcaggacataagagatgattaaatagagcaccgcggcaatgccgaaggcggtaaaaggttgatacgtggcggcgttaatatcgcgggctattttcagcagatccggcaccgtggcagtaaatgccaacgcagtagagtgcagcatcaggatcacttcgttgctgtatgccggtaacgcaatacgcagcgcagaaggcaaaataatgcagcgatacattttaaaagtcgagaagccataggctctggcggcttcaatttccccatgcggaaccgaacggattgccccagcaaaaatctcggtagtgtaagcgcaggtgttaagcgtcagcgccagcacggtacagttcaggccactgcggaagaaagcgttaaggaattcggttcccttaacaatctcaagcgtgtacatgccggaatagaacaccagcaactgaacatacagcggcgtaccgcgaaaaatataggtaaataaccagattggaaactggatgtatttattactggagacacgaccaatcgccagaaacagcgccaggactccgcctatcactaccgacaaaataagcagccacagagtgatcgccacaccagtaaagcgataaccgtcggtccacagcagcggtttccagtattcatgtaagatttcgatcacaggtcagccctcttcacacccacggagtagcggcgctcaaggaacagcagcacaccattggaaacagtggtgaaaaccaggtaaatcacgccacagacgatggcgaaatagaacggttcccaggtacttttgcctgccagttgggtggctttgaccacatcttccaggccgagtaacgaaaccagtgcggtagatttgaggatcacctgccagttgttgccaatgcctggcagggcgtaacgcatcatcgacggaaacatgatccgccgaaacacttgcccacgagtaaaaccgaacgccgtcgccgcctctatatgtcctttcggcactgccataaaagcaccacggaacgtttcggtaaaataagcaccgtagataaaaccgagagtgataataccagcgaccatcggatcgatatcaatctgcccgacgcccatcgcctccgtcaccgtgtttagcgcaatctgcaaaccgtagaaaatcagcagcatcaacactaagtccggcacgccacgaatcagcgtggtgtacccttcgaaaatcagccccgaaagccgattttgcgagagcttaccgccagcgccaattaaaccgatgattacagcgagcactacagagctgatagccagctccagcgtgacgagcgcaccctgtaaaataacacctgaaaacccatacaacatgctgcctgtcctgtcgtgtgtggtgaattaccgcctcttgtctccctccggttacccgaagggagcgggctttctttcaccgatggcgattagccaccataaacatcaaaatcgaagtactttttcgctaatttctcgtaagtaccgtcagcgcgcatttcggcaaaggctttgttcagtgcttcgcgcagttcgttatcttctttacgcaggcccatgccggtccctacgccaaacagtttttcatctttaacagacgggccaccgaatttgtaatctttaccgacaggttgtttgaggaaaccttcgctggcagcgacctcatcctggaacgcggcatcaatacgtccggcagtcaggtcagaataaatgttgtcctgcccctgatacgagacgatttcaatgccttttggtgcccaatgttcattaccgaacgtctcctgggtggtgccctgcaatacgcctacccgtttgcctttcagcgactcgactgtcggctgaatgtcagaatttttcgccaccaccaaacgagaatcggcagcgtacagtttgtcggtgaaggctatttcttgctgacgtttttccgtaatggaaagcgatgacatgatggcgtcaatcttcttcgcttttaaggacgggattaacgcatccagcggattttcgacaaacgtacattgcgtattgatgcgtttgcataattcctttgccagatcgatatcgaagccaaccagttcgccttgtgaattttttgattcaaatggcgcataggtcgggtcggtaccgatgcggatgttttgcggaatcgcagcaaacgccgcagttgcgctggagaaggccagaaccagagagagcgatagcaccagttttttcataatgtcctcaactgacagtctttttatagggaatatttacaggtttgttacacttatcgtgccataaaattgaccatcaaggcaaaatatcccgccccgttagacgtattatttttcattaaaaatgcttaagtatgcatttcaatgcaccacgatagtgcaacaaacctggcgtgcaccatgatgatcattccatcaggtacagcttcccagcgacgtatcagtcaccgtagacattaaagtcgaaatactttttcgccatcttgtcgtaggtgccgtcctgacgcagctcgccaagcgccttattgaaggcagccgtcagttcagcatcatctttacgtagccctacaccggtgccatcaccgaagtattttttgtcttttactgatgagccagcaaaggcgaaatctttaccagcaggttgcttgaggaatccttcgctggcagcaacttcatcttgtaacgcagcatccagacgtcctgcagccagatcggaatagaccaaatcctggttggcataggccaccacatccacgcctttactacgccaggtctcgttagcgtaagcttcctgggttgatccctgcagcacaccaacatgtttacctttcagtgaatccagcgttggctgaatcggtgaacctttggccgcaatcaaacgagaatctgcggcgtacagcttgtcggagaaggcaatctcctgctgacgtttatcggtaatggaaagcgacgaaataatagcgtcgatttttttcgctttcagtgaggggatcagcgcgtcaaagtcactggcaacccaggtacatttcacctgcatccgtttgcacatctcgttaccgagatcgatatcaaagccaacaaaatcacctttagcatctttcgatgagaacggtgcgtaggtggtatcggttccgatacgtaccgtctccggtagcgccgcatagctggaagccgctgtggagagaccgactaacaaagacagagcgagaatcgacttcttcatacataaccctcaagtgaaaatggcttttttatgttgtgtattgtgttgtgtgtttgcaggctctttcatgcaggtcttatgccatcttgacgacaacagtaacattcaacgttaaatatgttaataagacgttgcattattgtcctgaagttgaagatagcaggtatagcggttgaatcgcagcgtttcgattgaatggcagaaacaaaatgtcgaggatttgatcgcggttgcaaaattgccctgaaacagggcaacagcggagttatgcgccctgccagcgggcaaagagatcttcaggaagggttatcgcaaactggtcaagaacacgattaaccgtctgatttatcacatcatcaagggattgcgggcgatgataaaacgccggaacgggaggcataatcaccgcaccgatttctgccgcctgagtcattaaacgcagatggcctaagtgcaatggtgtttcacgcacgcagagcaccaacgggcgacgctctttcagcaccacatctgccgcacgggtcagtaagccatcagtatagctatggacaatgccggaaagggttttgattgaacagggtaaaatcaccatccccagcgtctggaaagaaccggaagagatgctggcggcaatatcgcgcgcatcgtgcgtgacatcggctaatgcctgcacttcgcgcagagaaaaatccgtttcgagggataaggtctggcgcgctgcctggctcatcaccagatgcgtttcgatatctgtgacatcgcgcagaacctgtaataagcgcacgccataaatcgcgccgctggcaccgctgatgcctacaatgagtcgtttcataaatagttgccctgtcagacttgcaggcagactttgcaggatttcggcgggagttgcaagtcagggtgccagaccggcaccctcagcgaaggcatcatccttcgttatgcatttcgagattttccacttcgttctgacgttgcactgctttggcgtcatcattacgtaacgtatcgaggaaatcgaggtagccctgatcaacatctttggtgacgtagacgccgttgaacaccgagcattcaaactgctggatatccggattttcagcgcgaacggcgtcgatcagatcgttcagatcctggaaaatcaacccgtcagcaccgatgatctggcgaatttcatcaacttcgcgaccgtgagcgatcagttccgtggcgctcggcatatcaataccataaacgttcgggaagcgaatttccggtgccgcagaagcgaggtacactttcttcgctccggcttcgcgtgccatctcgataatctgctcagaagtggtgccacggacgatggagtcgtcgaccagcaggacgtttttatcgcggaactcggcgcggttggcattcagtttacggcgcacggacttacgacgcagctgctggcccggcatgataaaggtgcggccaacatagcggtttttaacgaagccctggcggtacggtttgcccagaatacgagcaatttccagcgcgatatcacacgaggtttctgggatcgggatcaccacgtcgatatccagatcttcccattcgcgggcaattttctcgcccagtttcgtgcccatattcacacgcgcgctgtaaacggaaattttgtcgataaacgagtccgggcgggcaaagtatacatactcaaacaggcacggattgctgaccggattgtcagcacattgacgggtaaacaactgcccttcttcagtgatgtaaatcgcttcgcccggcgcgacgtcacgcaggaaatcaaagcccagcgtatcgagcgctacgctttcggaagcgaccatatattctgtacggttctcgtcaatatcacgttttcccagtaccagcggacgaatcccgtttggatcgcggaaagcaaccataccgtggccgataatcatcgccacacaggcatacgcgccgcggattaagcggtttgtggcagcaatggcagcgaaaatattgtcggcttccagcgggtagtggcggaagttgtccagctcgctggcgaagatattaagcagaatttccgagtcggaagtggtgttgatgtggcggcgtttttcttcaaacagttttttacgcaactcgtgagcgttggtcagattgccgttgtgggcaagcgtaatgccatacggggagttaacgtaaaacggctgcgcttcagaggcgctggagctgccagccgtggggtaacgcacatgaccaatgcccatattgccctgcaaacgctgcatatggcgagcttcaaatacatcgctcaccagcccgttcgctttacgcaaacggaagcagttattggcatctatggtgatgatgccggcggcatcctgaccgcgatgctgaagcaccgttaaggcatcataaatcgactggttaaccggcataacaccggcgataccgacaataccgcacatacgtctttttcctcgttaagccacatctcagagcacttacgctctgggcaagaaacttgacgagctttgcagataatcaaaaaaacatctgatgataaaactgaattgcgggatcagctgtgatttgctccagtcttcgcttttcgacaccccggtaaaggagtcgagaaagaagagaatggcagcaacaatcaacacaccgcgcaacgcaccgaaacagacgcccagcacccgatcggtgcctgacaaccccgttttctccaccaactggcctatcacgaagttcacgatagcaccaacgatcagggtagcgataaacagtaccgcgatggcaatcccatttcgaaccagttcgtcttcaaagcccgtaaaccagactgacaggtaagtgtagtaatgactggcaacaaagaaagcacaaccccatgtcaccagcgataacgcttcacgaacaaagccgcggatcaggctaaccagagaggaaaaagcaatcaccgcgattatggcgtaatcaatccagaccatatgtgtcccacgattttacgccctgtcatcctgttcggggcgcattctaacagaaaaagaaaacgtttgcgtagggatttccttcccgcgcatcaataaaaatggcgctgaaaaaatattcaacgccatcgactttttatgcctttgcggcatcgggcaatgcgtgtcggatgcggcgtaaacgccttatccgacctacggttctacccctgcgtaggcctgataagacgcgccagcgtcgcatcaggcaagaccgtattaattcggcgtatagcccattaccacgccacttaagccagaaagttgcttcaactcacccagcgaacctttcagcttatctttcgaggcatccggcccaaccagaatacgggtaattttaccctgcactggcgtggatggcgacgtataaacccgataaccggcaccgcgcagcttaccgacaatctcattcactttatcggcatttttcagcgcacccagttgcacaacataggctttacccgtcggtgcagctttttcttccacgaccggcttcggttctggcttcggcgcaggtggtgcttcaacctttggtttaggcggctccaccggtttcggcttcggtggggcgaccggtgcaggttccggttcaaactcggtgttattggctgcaatagtggccggatcgagcgacggtgctgcggcatcacctgcccgcacctcttccgctgcgccttccggcggctgcgtcggtaacgcctgggtggcggctggcatcatatcaggctcatcacgatcgcccgctttcggcaccagcgggatagccgcgaactcatcctgataatgttttttctgcccgtccagcagccctggaagtacaatcacccccagcgccaccagcacgatcgtgcccactaaccgattctgaaacttacttgccaccgcttctcctcgcgtcaatcacttccatgacatgtgcgaccgtgtggaaagaaccacacaccagcacggtgtcttccgctttagcgtccgccattgcggcatcccatgcctgcgcaacgctatcaaatgatttgccgttacccaaatgctcaagcagttgttctgccgtggcaccgcgcggcccttccagtggcgcacaataccagtcatcaaccacgcttttcaaccaggccagagttccggcaatatctttatcatgtagcataccgataaccgccagcacgcgcccgtttttcggtagcgctttcatacgcccggtgagatattccgccgcatgtggattatgcgcgacatcaaaaataacgcgtggcgactcgctcacaatctggaaacgtcccggcaaaattgcgctggcaatcccgtcgcgaatggcattttcactgacttccagcccgctggcacgcagtgccgccagcgctgttgcggcattcggttgcgggacaagcggcaacggcagattttccagcgtgccgtgagcatcgctaaacgcccagtcatgatcggtgacggaatagttccactcaacgccccgacgttgtaacagtgcacctttttcctgcgccacatcagcaatggtagaaggcatttccggctcaccgacaattgccggtttttcgctgcggaagatgcctgctttctcgcgaccaatactttcgcgatctggacccagccagtcggtatgatccagcgcaatactggttactaccgcgacatcggcgtcgacaatattggttgcgtccagacgaccgcccagccctacttccagaatcaccacgtcaagttgtgcctgcttgaacagccacaacgccgacagcgtaccgtactcgaaataggtcagggaaatatcaccgcgtgccgattcaatctccgcaaaagaggcggtgtgggccgattccggcaattcctggccctgcacacgtacgcgctcggtataacgcaccagatgaggcgaactgtagacgcccactttgtaccctgccgccatcagaatcgactccagcgtacggcaggtggtgcctttgccattcgtacccgcaacggtaaacacaaatggcgctggtttcaggacgccaagacgcgccgcgaccaggctcacgcgctcaaggccgagatcgatagttttactgtgcaggttttccagataagaaagccacgaagccagaggcgacgcggcttgaggagtgcgtttgataatcatggtatccgctgattcgttacggtgagaatagcaaaagggcagagccagtggccctgcccttatcagttatcaggcctcaggttcctgatccggtaccgggggtaccactacgccttcacgcggcgcttcaggattcggcgctggcagattcatcaacttcgccagaatgctcgccagtttcaggcgcatttccggacgacggacgatcatgtcgatcgcgcctttctcgatcaggaattcactgcgctggaatccaggcggcagtttttcgcgaacggtctgttcgataacacgcggaccggcaaagccgattaacgctttcggttcagcgatgttgagatcgcccagcatggcgaaacttgcagaaacaccgcccatcgtcgggtcggtcagcacggagatgtacggcaagccgcgctcctgcatttttgccagtgccgcagaggttttcgccatctgcatcagcgacatcagtgcttcctgcatacgtgcgccaccagaggcggagaagcagatcagcgggcagttatcttccagcgcctgctcaacggcacgcacgaaacgtgcacccacaacagaccccattgaaccgcccataaaggcgaactcgaatgccgcagcgacaaccggcattccatacagagtgcctttcatcaccaccagcgcatctttttcgccggtttctttctgcgcagatgccagacggtctttatacttcttggagtcacgaaacttcagcacatctttcggctcaagctcgctacccagctccacaaggcttccttcatctaacaggctatgcaggcgattacgcgctgtcatacgcatgtgatggtcacacttcggacagacctcaagattacgttccagctcagcgcggtataaaacctgaccgcagctatcacacttagtccacaccccttcaggaatgctcgccttgcgggtgggagtaatgttgcttttaattcgttcaatccagctcattagggacctttctgtctgaacctggttcgatgccagttttatctttggggacgcataatgccatttttgcccccaacagaccatgaatgttgcacattaaaacataacagcccgaaactttggataaaaaagtggtcgaaccgcggagttactttttattttgcggcgcgtgccgcagcgcgtttgtgacggattatttcgatgacgcccggcaaaatagaaaccacaataatcccgacgatcagcagcttaaggttatcctgaaccatcgggattgtaccgaagaaatagcctgcgtaggtaaaaagcagtacccacaacagtgcgccgatcacgttataagcggcgaaatgacggtacgacatgtggcccattcccgcaacaaacggggcgaacgttctgacgatcggcacaaaacgggcgagaataatcgttttgccgccatgtttctcataaaactgatgggttttgtcgagataactgcgacggaaaattttcgaattgggattactgaacaacttttcaccgaacaaccgcccgatagtgtaattgaccgcgtcacccacaatcgcggcgatcagcatcagcaccaccatcatatggacgttgagatcgttggtttccagtgatgccaacgctccggcaacaaacagcaatgaatcacccggtaaaaacggcgttaccaccagaccggtttcacagaacaaaattaagaacaaaatggcataaacccagacgccgtactccgcgaccagctctgccagatgcacgtcaatgtgcaggataaaatcgatgaggaaataaatcaggtccatatttgcctatgccttgtactcgtcatctttcaggctgtaactacgttggctacagcctgaaatgttccgagcattattctcgttagtccgccagaaatagcgggcccattggcggttttggaagatcataccggtcagggtaatccaccgcgaccagatacagcccttccgcttttgccgttgctgccgccagcgttctgtcctttgccgccagcaactctgctatccagctctccggctggttgtgggcaccgacttccatcaggctgccgacaatattcctgaccatatgatgtacaaaagcattcgctttaatatctaccaccacataaggaccgtgacgcgtgacattaatatgcataacgttgcgccacggggttcgggactggcactgcaccgcacggaacgaggtgaaatcattctcgcccagcaagcattgcgcagcccgatgcatccgttcagcgtccagcggttcgtaaaaatgggttacccctttactcagtaccgccgggcgcagccgatgattgtagatgatgtagcgataacggcgagccgtggcgctaaatcgggcatgaaaatcatcaggtacagttttaacccaacgcacagcgatgtcaccaggtaaattcgcatttacgcccaaggtccacgccgcgtctttgcgcagcgcggttgtttcgaaatgcacaacctgcccggtaccgtgtacccctgcgtcagtacgcccggcgcagaagacggtgatgggttcgttcgccacctgggagagcgccttttccagcttctcctgcacactgcggacttcgttctgccgttgccagccgtaatacttactgccgtcgtactcaatgcccagcgcaattttataaactggcggttgttgctggtcggacattagtacagatactcctgcaccagtttctcggcgatttttactgccatcagcgcgccgccaaagcgaacgttatcggccaccgaccagaactggacttgctccggcataccgtagtcattacgcacgcagccaacagaaagatgcggcgtacccgaagcatcacctacctgagttgggaattcgttctcttcagagagcacaatatcttcgccttgaacaaacgcatcacgcgcttcttctgctgccagtggacgcagagcttcaaagttgaccatctgggcatgaccgtagaataccggtgcctggacgacgctagccgaaatcatcagcccttcgtcctgcaggattttgcgtacttcgtcaacgatacgacgttcttcacgcacgctaccttcgctatccggcagtaacggcagcatgttgaacgccagctgacgcccgaagaaatcttcttcgtcaatcggaatgccgttgagcaatttcgcactctgccccgctaacgcatcgaccgcttttttgccctgggcggaggctgaaatcaggctggtaacgctgatacgtgataaaccgccctgatcgattaacggtttcagtgccgccagcagctggctggtcagactgtctggtacggcgatgacattccggttccggtaatctgtcagtacaaacgggtttacttccggcaccaccagcggtacgtcgggttcgagagcaaacaatccactgctgtcgatcaccaggcaacctgagttggtcgcttcttcaacccaggcagcggtagcttctttgcctgcgacaaaaaatgccagctgcgcctgcgtccagtcgaattcagcggcatcctgcacggtgattgtcttaccaccaaagcgcagttgttcgcctgcgctttcgttacgtgccagtgcataaatttccccaaccgggaactgacgttcagccagcgtttcaagcagggcttcgcccacagcgccagttgcgcccaggacggcaatgttccagccttcagacatggtggtttactccagaaatagcaaagctccctgccaatgttacagcagagagcatgaagaagagattaacgtgccggatgatgaacggcgttaaaacccagtttacacagcaatgatgccgcactggcgtcatcacaaattacatacagagatgaccattcacggcgctcaagatagtttttgcgcagtttatcgaactcacccggtatcccggcgactttacgcagcggtgcgtcatcgcggcgcacatcatacaccaaatgcaccagccttttcagcgtcggttgatcgagcgggccatgcagcgtaatgcgaccaaactctggcgcaggcagtaatgtatccagcgcaacgtgctgttcatgcccaataaacttgctataagcttcaaacacttgcgtagtaccgcgtgctttaccttccagggtatagcctgcgatatgcgacgtgccgatatccacttttttcagcagctcgacgttgagttccggttcgccttcccagacatccagcactacgcttaacttctggccttcattcaggcaggtcagcaacgcagtattatcgacgactgcgccacggcaggcgttaatcagaatcgctccgggcttcaggctacggatcagtttttcatccgccagatgtagcgttttgtacggaccatctttaaagagtggcgtatggaaagtcagaatatccgcgcgctggactaactcatccagcgagcggaaatcaccctcatccccacggtcggcgcgaggcggatcgcaaagtaaggttttaatccctaacgcttccagtcgcgcctgcaatcgacgtccaacgttaccaacgcccacgatccccaccgtacggtcgtacagtgaaaatccatcgcgttcggcaagcatcagcagggaggagaaaacatattccaccaccgcaatcgcattacagccaggtgcagcggaaaaaccaattcccgcctgcttcaaccatgcttcatcgacatggtcggtccccgcagtggcagtgccaacaaatttaatgggttttcctgccagcaaagattcattcactttcgtgaccgaacgcaccatcagcgcatccgcgtctgccagttgagcgacggggattggacgcccgggaaccgcggtcacctcacccaaacggctaaataagtcgcgggcataaggcatattttcatcaacaaggattttcacgtttgtgttacctgtatgagacgagagttaaccggacaagtgtgccataatctcgcggccaggcatacttgcgaagatttcaggtataaggatacgtaatgatacaacctatttccggccctcctcctgggcaaccaccaggtcagggagataatctgccgtctggcacgggcaatcagcctttatccagtcagcaacgtacttcgctggaaagcttaatgacgaaagtgacctcactgacgcaacagcaaagagcagaactgtgggcgggtatcaggcacgatattggtctgtcgggagattcaccgctgctttcgcgtcacttccctgccgctgagcataatctggcgcaacgtctgctggccgcgcaaaaaagccattctgcccgccagcttttagcgcaattaggggagtatttacgtctggggaataatcgtcaggcggtcacggattatatccgtcataactttggtcagacgccgctgaatcagctctcaccggagcaattaaaaaccattctcaccctgttgcaggaagggaagatggttattccgcaaccacagcagcgcgaggcgaccgaccgtcctttattaccggcggagcacaatgcgctaaaacagctggtgaccaaacttgcggcggcaacgggggaacccagcaaacagatctggcaatcgatgctggaactttccggggtgaaagatggcgagttaattccagcgaaactgtttaaccatctggtgacctggctacaggcgcgtcagacgctaagccagcaaaatacgccgacgctggaatcactacagatgacgctaaaacaacctttagatgccagtgaactggcggcgttatcggcatatatccagcaaaaatatggtctttctgcgcaatcatcgctttcttctgcccaggccgaggatattcttaatcagctttatcaacggcgggttaaagggattgatccgcgtgttatgcaaccgctgcttaatccttttccaccgatgatggacacgttgcaaaatatggcaacgcgtcccgcgctgtggatactgttagtcgcgattatcctgatgctggtctggctggttcgttaaccccgacgaaatgacagtatcgtgacaataatacccagcaccgcagagatcgccccggcaagaaataccgaagagtaaccaaacgtggtcgccagcattcccgccagcggcccggagacgccgagggcgatatcctgaaacgcggcgtaaccgcccagtgcggtgccgcgaacttgtgaggggacgcgtttaaccacctccacgcccagcgcaggaaagataagcgaacatccggctccggttaacgccgcgcccgctaatgcgacccatgcacctggggcttgccagagcagcaacaagcccaccgtttctacaagcagagagacaatcgccactttcacgccgccaaaacggtccggcatccagccaaacatgacgcgcatcacgacaaatgcgccgccaaacgcggtaagagtaaagcccgccatcgcccatcctttgctggcaaagtagagcgaaacgaaagtcccgataacagcaaaaccaacgccttgtagtgccagacctaaccctggtttccagataagcccgacaacgctccacagcgatggacgttctcccgccagggccggtactttgcgcactgtgccgttacaggcccacgccagtacgggtaataccattgtggtgatcgccagtgcggcaaaaccgtaatggctatgaatcaacaggccaagcggagcaccaacagcgagggcaccgtaaatcgccattccgttccatgacatcactttgccagagtgttttggccctacgatgcctagtccccaggtcagagcgcctgtcagtaactggctttcaccaaagccaagaatcaaacgcccgacgaccaacagagcaaatttgaacggtgcggagacaggcaaaatcgccgccagcagcaacgcgccgccagccagaccacaagctaacattccctgaagcgccgaacgttttgcaccatattgatcggccagtcgcccggcgtaaccacgcgtcagcaccgtagccagaaactgaatcccgacggcaatgccgaccatggtattgccatagcccagttcatgatgaacaaacagcgggataaccggcaacggcaaccctacggtcatgtaggtgagaaaaaccgcaaaagcgatgcggaagagcgaaaaattggcagaagatcgtgtttcggtttggcttacagcagtcatgcattactccagaatgcagcgcaaggcgaggagtatccccgtctcatctctctggtttcagggttacggtgcgttggcaggatttaacgcgtacgtcttttcagaaggaaatcgacaaagcgggaagtttgcctggaactggcggcgattgtcaatgatgtgaaaaagggaaccatcaggttcccttttgcgttagtgccggaggccgcattggcgcgtaacgtcggatgcgacgctggcgcgtctactccgacctactgcgaattaatctttcagcttgcgcattaccagcgtggcgttggtgccgccgaagccgaagctgttagacataacggtggtcagttcgcgatcggtcgtttcggtcacgatgttcagacccgcagcctgctcgtccagctcttcaatgttgatgctcggggcgataaagccgtgttccagcatcagcagagagtagatagcttcctgtacgccagcagcgcccagagagtgaccggtcatggctttggttgcagaaatcgccgggctcttatcgccgaacacttcacggatagctgccagctctttcacgtcgccaaccggagtcgaagtaccgtgggagttcaggtaatcgattggggtatcaacgccatgcatcgccatcttcatgcagcgtactgcgccttcgccagacggagcaaccatgtctgcaccatcagaggttgcgccgtagccaacgatttcagcatagatgtgagcaccacgcgccagcgcgtgttccagctcttcaaccactaccataccgccgccgccagcgataacgaaaccgtcacggtgagcgtcgtaagtacgggaggctttttccggggtgtcgttgtatttagtagacagcgcacccattgcgtcgaattcgcaagccatttcccagcacagctcttcgccgccgccagcaaacacgatgtcctgtttgcccagttggatctgctctactgcgttaccgatacagtgtgcggaagtcgcacacgcggagctgatggagtagttaacgccatgaattttaaacggggtggcgaggcaggcagaaacgccggatgccatcgctttggtgaccacatacgggccaaccgctttcaggccgcgcgggccgcgcattgcgtcagcgccgaacacctggaaacgcggggagccgccgccggaacctgcaatcaggccaacgcgcgggttattctggtaagcttccggagagaggcccgcatcagcgattgcctgctccatagaaaggaatgcataaatggatgcgtcgctcataaagcgcacaactttgcggtcaatgaggccagtggtatccagttttacgttgccccagacgtggctacgcatgccggaatccttcagctcctgagagaaagtgatccctgaacgtccttcacgcagagatgccaggacttcctgctggttattaccgatgctggaaacaatgcccaggccagtaatcactgcacgtttcattcaatacctctgtaagtcgcacatagagtaagtttcgaatgcacaatagcgtacacttgtacgccgaacaagtccgatcagccatttaatagagaaatttgcgcagccttacacacatcgctaagatcgagccaccgcctgtaagacgagtaacttacgtgaaacactactccatacaacctgccaacctcgaatttaatgctgagggtacacctgtttcccgagattttgacgatgtctatttttccaacgataacgggctggaagagacgcgttatgtttttctgggaggcaaccaattagaggtacgctttcctgagcatccacatcctctgtttgtggtagcagagagcggcttcggcaccggattaaacttcctgacgctatggcaggcatttgatcagtttcgcgaagcgcatccgcaagcgcaattacaacgcttacatttcattagttttgagaaatttcccctcacccgtgcggatttagccttagcgcatcaacactggccggaactggctccgtgggcagaacaacttcaggcgcagtggccaatgcccttgcccggttgccatcgtttattgctcgatgaaggccgcgtgacgctggatttatggtttggcgatattaacgaactgaccagccaactggacgattcgctaaatcaaaaagtagatgcctggtttctggacggctttgcgccagcgaaaaacccggatatgtggacgcaaaatctgtttaacgccatggcaaggttggcgcgtccgggcggcacgctggcgacatttacgtctgccggttttgtccgccgcggtttgcaggacgccggattcacgatgcaaaaacgtaagggctttgggcgcaaacgggaaatgctttgcggggtgatggaacagacattaccgctcccctgctccgcgccgtggtttaaccgcacgggcagcagcaaacgggaagcggcgattatcggcggtggtattgccagcgcgttgttgtcgctggcgctattacggcgcggctggcaggtaacgctttattgcgcggatgaggcccccgcactgggtgcttccggcaatcgccagggggcgctgtatccgttattaagcaaacacgatgaggcgctaaaccgctttttctctaatgcgtttacttttgctcgtcggttttacgaccaattacccgttaaatttgatcatgactggtgcggcgtcacgcagttaggctgggatgagaaaagccagcataaaatcgcacagatgttgtcaatggatttacccgcagaactggctgtagccgttgaggcaaatgcggttgaacaaattacgggcgttgcgacaaattgcagcggcattacttatccgcaaggtggttggctgtgcccagcagaactgacccgtaatgtgctggaactggcgcaacagcagggtttgcagatttattatcaatatcagttacagaatttatcccgtaaggatgactgttggttgttgaattttgcaggagatcagcaagcaacacacagcgtagtggtactggcgaacgggcatcaaatcagccgattcagccaaacgtcgactctcccggtgtattcggttgccgggcaggtcagccatattccgacaacgccggaattggcagagctgaagcaggtgctgtgctatgacggttatctcacgccacaaaatccggcgaatcaacatcattgtattggtgccagttatcatcgcggcagcgaagatacggcgtacagtgaggacgatcagcagcagaatcgccagcggttgattgattgtttcccgcaggcacagtgggcaaaagaggttgatgtcagtgataaagaggcgcgctgcggtgtgcgttgtgccacccgcgatcatctgccaatggtaggcaatgttcccgattatgaggcaacactcgtggaatatgcgtcgttggcggagcagaaagatgaggcggtaagcgcgccggtttttgacgatctctttatgtttgcggctttaggttctcgcggtttgtgttctgccccgctgtgtgccgagattctggcggcgcagatgagcgacgaaccgattccgatggatgccagtacgctggcggcgttaaacccgaatcggttatgggtgcggaaattgttgaagggtaaagcggttaaggcggggtaatctgctctcgcagtgtttgccggatgcggcgtgaacgccttatccgacctacgtgtgacgtgtaggcctgataagacgcgataagcgtcgcatcaggcatgctgctccagacgccgcaacttactgctgtgacgcctgctgaaacaggttttcccacatatcggtcaccagcgcctggtcacgcggcgacaattcaccagcaccaatggctttttccagactctggctaacggtcgtatgcaccgcctgagcggagtggtcatcaccactttccagttctgcgatggctaatgtcaggtggccacgcaaatacccactggcaaacaactcatcatcactggcatggtcaaccataccgtcgattaatgccagaatgcgtgattcaaactccgcgatcatcttctttcctcattgtaaaacgtggcgctggcttcagttgagcgcttccggccacgggaactgttccgccgtaagttccggcgtgtgataataattttgtagtgctttaatgaagcgtgccggacgttccggaatgccatttgtcagataatccatcacctgcgcatgtactcgccgttgaaacaccacacgatccggttcgaaatccccttccagattgtcgcaactgacgttaaacggatatcccgccgccacacagaacaaccagtcgagcgcctgcggcttcacttcaacatcttcaaactggctttgcgtttgggcatcgcgtccgtccgggcaataccagtagccgaaatcaaccagctcacggcgcgctttcccggcaatacaccagtgcgaaatctcatgaattgcgctggcataaaagccatgagcaaagacgattcggttatacggtacttccgcatcagcaggaagatagatcggttcgtcgtcgcctttaatcagacgggtattaaaatcatcggcaaagcagctattaaaaatttcaatcaactgctcgtagtggtgtgtactgttcattagttcatccccaaccagtggaggatctcctgtccgtggctgtcgtaaagtaatttggcactcatcaccgccgagacgataacaatcatcgggcggatcagcttttgtcctttgctcaacaccagtcgtgaacccatgcgcgcgccgaggaactgccccaccagcatgacaaagcccgtcgcccaaatcactttgccgccgagaataaacagcagtaaaccgccgatgtttgacgttgcgttgagtaatttggcgtgagccgtggctttggcgaggttaaatccgcacagcgtaacgaaggccagcgcgtaaaacgacccggcagccgggccaaagaatccatcataaaaaccgacgcagccaccggctattaacgcgaagggtaaaccgtacatccggcgctggcggtcttcttcacctagctttggcatcagcaagaaatagaggccgatacaaattaccagaatgggcaaaatctgccgtaagacatcagcctgaacgtattgcaccagcagtgcgccgctcattgagccgacaaaggtcatggcgatattgagtttctgatcgcttaaactaaccactttgcggcgaataaagtagatagtagcggaaatagagccgccgcaggcttgcagtttattggttgccagcgcattagcgggagacatccccgctgccatcaatgccggaatggtgagtaacccaccgccaccggcaatcgagtcgataaatcccgccagcatggcgacaaaaaagagaactcccagcaacagcggggaaaccataaacaggctattaaacgtttccattagatcacgtgctcatccagtagcgcctggcaggaaggcggcaacggaggcggtgtcttcttctcaggctttgttgttcccggttttggaggttcaaaccagctttgcagttctgccccgcaaccatcgcctgatggcggtaaaggttgatcttcacactccagactatcggcagggcaacgtaatcgtacatgcatatgcgcgcgatgctggaaccagggtcgcactttgcgcaaccagtcgcgatcggtgcccgcatcaaggcaaagttgttgtttaatcgccggattaacaaaaatgcgcgtgacgtctttgtcctgggcggcgagtttgatcaagctgaaaatttctggcttccacagcgtggagacaacgtgtttaccgtcgcgggaaactaagtccagtgcttgcgggcgcaagagctgcgcggaggtccagcgagttttcggcagttgcagaaagatatcgacatccagtccggtctggtggctggcatgaccgccgttgaaacgcccaccagcgggcatccccatatcgccaatcagcaccgtacccatgcccagattgctcacctggctactcagacgctggataaacatcaccagatccgggtgaccgaaatagcgacgctgatcggtacgcatgacctgataatgttcggactgtatcggcagcgtgtcagcgccgacaatacagccattagaaaaactgcctatcgattgtgcgctacccggcacaggttgggttattttttgccacggcgtcgctgccaggctggcgctactggcaagcagagccagcagcgcaatcgcggttttattcattttttaccagcgtggaatatcagtcttcacatcggcattttgcgcccgttgccgtaacaggtgatccattaaaacgatcgccagcatcgcttctgcgatcggcactgcgcggatcccgacacagggatcgtgacggcctttggtgatcatctcaacttcttcgccaaagcggttaatggtacgacccggcacggtaatgctggaggtcggtttcagcgccatatgggcaatgatttgctgcccgctgctgataccgccgagaatgccgcccgcatggttgctctggaaaccgtctttggtgatttcatcgcggttctggctgccgcgcagcgccaccacgtcaaagccgtcgccaatttccacgcctttcaccgcgttgatgctcatcagcgcatgggcgatgtcagcatccaggcggtcaaagaccggctcgccaagtccggcaggaacgccactggcaacaacggtgactttagcgccgatggagtcgccctcttttttcagcgcacgcatcaactcgtctaacgcgtcgattttgtcggggtccgggcaaaaaaacggattttgctcgacctgcgaccagtctttgatatccagcggaatgtcgcccatctgggtcaggcagccacggatttcaataccaaatttctcggcgagatattttttggcaatagctcctgccgccacgcgcatggcggtttcgcgggcggaagaacgtccaccgccgcgataatcgcgcagaccgtatttttgttcgtaggtgtaatcggcatggcctggacggaaaacgtccttaatcgcactgtaatcctgagagcgctggtcagtgttttcgatcaacaagccaatgctggtgccggtagtaacgccttcaaaaacaccggagagaattttgacctgatccggctcgcggcgctgggtggtatagcgcgatgtcccagggcgacgacggtcgaggtcatgttgcaggtccgcttccgtcagcggaatgcctggcggaacaccatcgacgatgcagccgagcgccagcccgtgcgattcgccgaaggtggttacgcgaaagagttgtccaattgtgtttccagccatcacggctccgttattgttgtgtttgcgtgtttacttaatctttataaatcgcgaaatgttctcgtgcggcaataagctgctctttggtgagcataaacacaccatcgccgccgttatcaaactccagccaggtgaacggaacatccggatattgttccataagatgtaccatgctgttgccgacttcacaaatcaacacgccatcatcagcaaggtaatctgccgcgttaccgagaatgcgacgcgtcagtttcaggccgtcagtgccagatgccaggcccagttccggctcgtggcggtattcgtttggcaggtcggacatatcttccgcatcgacatacggcgggttagtgacaatcaggtcgtactgcactttcggcaagtcgcggaacagatcggaacgaatcggaatgacgttgtggatcagaccgtgttcttcgatgttctgttcagcaaccgccagcgcgtctggagagatatccaccgcgtcgacttctgcatccgggaaggcataagcacaggcaatggcgatgcagccgctaccagtacacatatctaaaatatgctgcggttgcttgctgataagtccggcaaatttattgttgatcagttcaccaatcggcgagcgcggcaccagcacgcgttcatcgacgtaaaattcatggccgcagaaccacgctttgttggtcaggtaagccaccggaatgcgttcattgacgcggcggatcacgcgttcaacaatacggtgtttttcgctggaggtcagacgcgcggtgcgcatatcttccggaatatccagcggcaggtagagcgaaggcaacaccagctgtacggcttcatcccacgggttatcggtaccgtgaccgtaccagatatttgccgcgctgaagcggctcaccgaccagcgcaacatgtcctgaatggtttgcagctcatttactgcttcatcaacgaaaattttatccacgtattcctccagggcatgatcgcaataatttcggcggctagtttgccatgaagatgacgataaatcagcattcacgcgcggtgagtgaggaaaaatacgtttaaaacgatcgattgcgctacgagtcgggtaaactgtaggaaaattagaaatagagacagataaatgaaaaagaaaacaacacttagcgaggaggaccaggctctgtttcgccagttgatggcggggactcgcaagattaagcaggacacgattgtccaccgaccgcagcgtaaaaaaatcagcgaagtgccggtgaaacgcttgatccaggagcaggctgatgccagccattatttctccgatgagtttcagccgttattaaataccgaaggtccggtgaaatatgttcgcccggatgtcagccattttgaggcgaagaaactgcgccgtggcgattattcgccggagttgtttttggatttacacggtctgacgcagctgcaggccaagcaggaactgggggcgttgattgccgcctgccgccgtgaacatgtgttttgcgcctgcgtgatgcatgggcacgggaagcatattttgaagcaacaaacaccgctgtggctggcacaacatccgcatgtgatggcctttcatcaggcaccaaaagagtatggcggtgatgcggcgttgttggtgttgattgaagtcgaagagtggctgccgccggagttgccctgaggagttgagcgcgttgcgccaggtacgggtaatggcaggggcgaatgcccctgcctggtgtatctaagggctacaactcattcagtatgtactggaaccggcaagtagaatcgattggctgcatactgctggtatcaacacgcacgaccatatcgtgtaactgtttgtccgttatagggtgtcgatttggcgtgaccgagacttccgccttgtcacatcccgacgcggtaaaagttatcatctgtgcaacccagcggcagtaaccacctgtttcattcatctgcgtactgtcgcacaacttcccatctttcatcaaatacgttgaaagcgttttctcaaccacaccgcccgtcgactgcagggtgagcagttttgacttactgacataattctcattccatgaaacgtcataaggttgaacagaaacggatggacaaatcgtgtcgtgactatcaggcccctgatacgtcacgccccctggagaggcttcagagtcattcataataaccaaccatggacaagaaaagtaagattcaatctctgcagagacaataacctcaaatgtataatacccgcagttccacccagacggtaatccaggacaacttgctttgttgatattttgatggtagccaatcagcttaaccgaaggggcaggaggaggaccactccagctcacattttgcaatatttccccagtcatgagccattgactacttttatattcaccaacgtacactgcggatggcatcattatttttaaattaaaagtcgcaatattacgcgaatcaccgttgtaaccgtagtaaacgtcaacgctatgcccggcagccatagcttctgtagtagcaataagcatgaccagagcgaacaaccatcgtagtattttcattttaaatatactcaaatgtcgcagttaaagaggcggtaaattcaccgatcgtcacatcacggccgcttttcgcctgtagccaggctctgaaattgatatcgttattgccattggttagcgcaaaggtcgccccatttgtattgttgatggcaacctgcattccgtcggttttttccatgccaattcccactccctgagcggttgatgacgtatccagtgccagaaaaccgggttgttcgctgtcttctacccccgtgagcgtgacttttacgttgtatcccgccggccctttgcaatctttcagcttaaagactacgggtacacgagcggactggcctgcaacgttcaaatcctgacgactgaccgtgggaaagcgcacctctgccagatattggccatccaccaccagcgcacaggatttacttaataaattaccggagaaatgcagattattatctgccgcgaataacgtgctactcattgccaatatcagccccgctaacaggacgtaaccaccggactgaatcattgatttattcattgataatccacccgtaatgttgcgtaagccgaaaaattcgtatcgcttaacacagcatcactcgcttttaccggtacggcctccagcttcggcttttgcgtaaaatcagtggcgttgatagcaagcggagtattgagtttaaaacgctgaccatcgtgctgaagctcgataccaaaaccgggtacatcagtttcaattgctgcatcattaaaactggtttgtgtaccagtccaggtgagggtcatctcccaatctggatgacgggtcgtcgagtcacaagtgagttcatatggcacctctttacgaccatagttgccgttgatgtcgtcgataatgagatcgcgaaattcgacttcaatggttttaccaccgctgatgctacaggttggcggtgacaataatgtcccgtgaaaggtgatgtcttcatcagcagcatgagctatggcgctactgacacaaagcagggttaagaaagtctttctcattgatagtccaccaccatggtcaaactggcgttaaactcgcccgcagcaagttgcgccccgcttgccttcacaggtacagccttcaactgtggctggttattgatattaaatggcgtccagctattttcaccgacggcaaacaatgagttatcggcgctattttctatccgaatgcccagcccggtgatattggtactgagtaccgtttcgccgttaatcgttgaggtattgcccttaagttgcatccgcaagtcgttagcaagactgtttgtgcagttcaacgtgtatttcgcatcttgccgataattggtgccatcaacgttatcagcaatcatattgccgaactctacctggctgcccttgattgaacagggtggcggagcatcgaccaacacgcgcagaattaaatccacgggtttactaccagccatagcagataaactacagacactgcataccagcagccctgcgcccactacaaacttttgactcataactccccccgtcatcagcctttgcggctctgctcttcatccacctggcagctgttgccattgcactggaagaacagcggcatccgtgcgccaaagtcgttgacgtaagtcagcaccggtacgctatccattttcacattcagcggtaccgtggttttcggctcaatgaccagaggcgagaaccctgcagctggattaccgtttttctgcgcactggcgttgctgataatcacgtagtacggcgttgggttattgacggtaaatgcctgaccgctgcgggtgagcgtcaccttgtgctgccacggacttttcatactgaccttttccagcgcctttggtcgccagaacaacttgatacgcgtttgcagcgcgatttgcagggtattgggtttgtttgattttggcgggatctcgcgcacgttaaagtagaacatgctttcacgatcggctggcaatttgttgatatccggcattccctgcacttttacctgcccgttcatcattgaatcgatgcgttgcactggcggcagcacagttaacggcgaggtgatcttgttacccttttcatcttcaatccagctttgagccagataagggagtttcggatcgttattacgcagcgtcacgctgattgatttgtcgctttcattaaatatcaaacgggtacgatctggcgttacagacgccagggcagacaaactggtagcgctaagcagtaacgccagcgtcatagcacccaatttggcagagcaaagtaaatcagacatggatcattccttaatcacgttattggttagctgaaacagaaacagggggatcggtgggtgtcacctgttgcgtctgctcctgaatgacaggctttatgtcatcaggaacaaccggcgcgacgttgcctttatgctggcatggcagtaacaagccgttaaacagatcggcaggcagcgggtccggcaggttgatatcgcaatgcgcaacaccactccagaacacactcatatgttcgccaggtttcaccccagccagatagacactaccgtcatcatcgacaaggcccactgtctgctcgttatcattttttacttctgcgccaaacggtggatggctgccatcttgtaaacgcagcaccgccatcgctttttgaccactgatgacggcaaatttgcggtagccaatggctccttcagttagcgtggcttgcaccaccgactgggttgcttcggcgttttccggcaatttgttgaggtcgatatacgcctgattgcgataataattgttaacgtcagaaacgacggctttaccaaacatattggtataaacagcagccccgttaccttccaccggaacatcggcaacgccatcggcatcaatcagcaggcgtgtcccgcccatattctgggtacggtgaagtgcgccgccgtgggtagtaagcgttgcgccgccctgtaacgacaagcccgcagaggtgtattgcccttcatggtagttcgcactgaggtcaacctgcgccagcgaaccatcatggctgtagtagccatcaacgctggtgtgtttgtcactggtgccgatgttcaactgatagtgagtcgcgtcatcgacacggctaaaataaccgacctggctgctgtccgtcccactgccatagttgccgttatagctaacggtactgttgtcgccccacggcatactgagcgaaatctacatgcccttatccgcccggttgtcatactcgtagcggtagccagtcagggaaacgctcatattacgaatgctgcccatattgaaatagtgggagagcatgatgttgtagtttgtctgctcctcacgatcccagtaggtatggcgggtatagttgagataaaccgaaacacccgcatcgcggaagttctggttataagtggcggtgtacatctctttgtcgttgcccgtacggaccatttcgctgtcactggcatccagatactcgctcatggtcataaagttctcttccgagaagcgatatccagcgaaagtgacgcggctgttgagctggtcaaagtctttggaataactcacacggaaggagttaccgtccagcgaacctttgccataagcggtgtctttatccagtttggtatgcgaatgagtaacatcaaacgcgaccgcgccgaaggtagacaaatcgcgaccgacgcccagcgccgcagactgatagttttcatcacccagcgcaccgccatataacgaccagccgttagcgatgccccaggaggcttcagcaccagagaaaaatcccccctcgacatggtggccccactcttgcggacgtcccatcatgatcttatagcgaacctggcctgggcgagtgaggtatggcatcgaggcggtgctgatgtcatattcctgcacctggccgttctgttcttcaatgcgaatatgcaacgtaccggagacggaatcaccaagatcctgaatacgaaacggtccagccggaacctgcgtttcgtaaatcacacgccccatctggctgacggtcacttttgctgtggtgtgtgccacgccggaaatgtctggcgcgtagccgcgcagattgggaggcaacatttgatcgtcagtgctgacactgccaccaacataattaaaaccgtcgaaaatatcggaattgaggtaatcttcgcccagcgccagtttggcttttaatgacggtaacgcccgccaggcataatagcgactccactcccattttttttgtgtgtcatcgccgccaaattcatcgtcatcatcattactgcgcgtatgttgatagttggtctgccagtcagcgcgcatacgccatggccccaggttaaccccgaccgtcccgttgccgctgatctcgttactgtcatcgccgccattttcttcgtgtcgtgtttgcgcagtgatgctgtagtccgcaatgatcccggagatgccatcatcccaacgagaaggtggatcccagtcgggccaggtatattcgaggtaagcctgcggtagtgaaatgactaatgcggactggcttaaatcagccttaatttccacgccttccagttgaccgggcttcaggcatttaccatcgtggctccattgcagatttttcgccacgtcttcttttaaaccaaactgcgccaccagttccggtgtcagacaagcatagcttttgctaacgtcatcttcaccagcataccagtaaatatcgtactcttccgccaatggctgtttatttagttgaacctgtaaattgtattttccgggctcaacatacccctggctggaaaaacgcttcagatcaatttttgtgtcgccttttaattccagaaaacgggaatcaaactgaatgtcgtcttcagcccagacactgctataactccctgacattgccagcgcaatgcaccacggaagaatccgtaatcgaaaaagagaatggtcaggcatacacgtttttatccgtttttattcttgttcggtcaaaatccatttaaataccccatagcagtgtcgctatgggggtatgccttacaggtaagtaatctggaaggtggtatttgcttcgaaattacccagatctggcgcatcagctgcgccgaccagccaggctttaaagttcagagtctgcttcgctttgcctttattagtggcagtatctttcacgattttctggtcaatacccatgccgcttttgtaagaggtacccagagagtcaccgatcgccaggctaacattgttaaatgccgcaccggtatcggtattgaaaatggtgtaataattgccgctatttgcagaagaaacggtaccagtaaaggtagtggtcattgtttcctgagtatcaaatacgcaatcttgcaggcgaatctggaaatttttcggcgtggtggtgccgttatttttcagtttttcggcaccgatatcacccatatcaacttccagtttgtgatcgtccggaacgatagaacacactgagtcttcaatggtgccgtaaaaacgtgcagtaccgttgttacccgcagcgattgttgccgtagaggtgaacgcgcccatcaccattgccgcagcaatagctgttttaacaaacttactcattatttgtccttaaactataaataattaaaatataaacattgcaatacattgattcagtcaatagccaatgtttatacccagccattgaatacggcatgcgatccaaaaaaacaggtcgtaaaaaatgtattcgttggtgtggggtcgaatagtgatgttttcactcccctgattcaatttaattttactaatgagtaaatgtagatttaattaatatattgataggggaaagattatcttaaggatcttctaaaaaaacacgaaatatatatttagaaaaaacaggaagcatatcaacaatgaatgccaatagcttaaaaaacaaacaatgaacatataatgcgattggcattaacccgcttttgtcgatataatatataaacactatagccagaatttaatcaagtttcaattacgtcctgcctgattattcaactctattttctccattatctgtattaataaatgataatgagtgtcaaacagacattattcatttcaacatgtaactttgggcaaaatcaagatacgcgcagaagaatactttccgaatgaaagttaaaggtgttttatttatagatggggagagtcttcgatagtagtgaggttgacagatatccgctgcctgatgagcaattatgcccaatgaatctacctcattgggcataatttggaactcatcagatagcttttgccatcttcagattacacgggctcatctgccagttgaatgtgccgtttccgctttcatcaagcgttacgctggcaatggccgaggtggtaaacataggcggcgtttcgcccggacataactcggcaaccagatacccgactaacggtaagtgagagatcaccagtaccgaagcaacaccttcattggtcaacgcctgcaaataggcactgaccagaccaacatcgccgcagggcgttaactccggcagaacttctgcactggaaggcaggttcagacaatcccctacttcttccagtgtttgctcggctcgcaggaacgggctcaccagaacgcgttcgatttccactttttgacctttcagccagttcgccatcaggcgagattcgtcacaaccattagtggtcagaggacgaacggaatcactggcggcatcgagggctgcgtcgccgtgacgcatgataaaaacttgcatattgcaccgcttttgttaaccagattcgcccgttttctttcatctgaaaccagagaaagaaaacggtggccggcattgtgccttatccattcaccgaatgaaacgctgttttttacctcaatggcgtaagtatagtcaatatgcgtttacattttgaccaacactccgccattcagcgcggattcatatagctttgaccttcttattgcaggtcagttgcagttgttttccaaaaactttccccacgcgcgcccatctcgaccaaacgctcgcaaggggtaaaacgggaaccatactgcgtggcaagtcgttgcattattgcaaccacttcgcccgcgccgagagaatcgatatagcggaacggtccaccgagaaatggcggaaaaccaatgccaaataccgcgccaatatccccgtcacgcacgctacggataacctgctcatcaacacaacgtactgcttcattcagcatcaacatcacacaccgttcagcaacctgcggtgcggagattcgcccctgcccttgtgtgccaatcagcgggtaaatggcgggatcgacctgttttttgcttttacgccctttctgaccataaagatagaaaccccggccattttttctgcctttgcgatcgtcgttcaaaattgaagaaacaacatttgcaggcgcgctaaaacgttctccataagcggcttccagtacaggaataattttagtcccggtgtcgattcctacctcatccaaaagttggattgggcctaccggaaaaccaaatttcactagcgcggcatcaatgtgctctacccgttcaccttgggtcaacatgcggatagcttcattaatgtaaggcgctaagatgcgattgacgtaaaaaccggctttgtcacgcacgacaattggcgttttaccctgttttttcgccagttttactgtggtagcgatggtttgcgccgatgtccccgcatgaggaataatctccaccagcggcattttttccaccggactgaagaaatgcaggccgataacttgctcaggtcgcgtggcgtgagcggcgatatcaccaatcggtaaagatgacgtattcgaagcaaagatggtatgagcggcgcaattttgctcaacttccgccaccatctgttgtttcaattcgagattttcaaacaccgcttcaataatcagatcgcgatgggcaaagccgcgatagtccgtcgttccggagattaatgccagctgtttgtcacgttcgctggctttgagatgacgacggcgaactttgccctccagctgatcccaactgtacttcagcgcatgatttatgccctgcgggttgatatctttaattctgaccggaatccccgctttacaagcagtgacataagcaataccgccgcccatcaagccaccacctaaaatccccacgctgtttaatggcgcaggcggcgcatcactgccgggatctttcttcacgtccgtactggcaaaaaagatactacgcagcgcctgcgattgtggcgtcatcgccagttcgccaaacgcccgagcttcggcgtcataaccgctgctggtgccctgcgctaatcccgtttcaacaacctccaggatgcgttctgtcgccggataattgccttgagttttgtgttctgttttcttgccgaccattttgaacagcagcgcacgacctaacggccccgccagaatacgctcgcgtacaggtagagggcgggaagatgggcgctccttctttgccagctcaacagcggcttccagcagaatggagtgcggaacaacgtcatccaccagccccagctttaatgcctgtttcgcccgaagttgttttccggtgaggatcatctctaatgctgtgctgacgcctatcagacgcggtaaacgctgggtgccgcctgaaccgggtaacaatccaagttgtacttcaggcaaaccgagcaccgttttaggatcgtcagtacaaacgcgaccgtggcacgccagcgccaactccagcccaccacccaggcaagcgccatgaatagccgcgataacctgaatgggcaaagcatgaatctccgccatcaactgttggccctgccgcgccagagcttccgcttcttgcgccgttttgcagttgccgatcatgttgatgtctgcgccagcaatgaagttgtccggtttagcggagacaaacaccacgcctcgcaactctttgttttcacggagttgcttaataatggcgcgcacctgcgaggcaaactccgccttcagggtattcattttctcacccggtacgtcgatggtgataacggcaatgttgtccagacgaacattaagggtaaacgctgatgtcatttccattattccgcctccagaaccattgccgcgccaagcccaccggcagcacaggcggtaactaaaccaaatccaccgccgcgacggcgaagttcatgcaatgtctgggtaatcatccgcgcgccggtcgccgcgaagggatgcccgtaagcaatcgaaccgccaagcacgttaaatttgctatcgtccacttcgccagtggcatgtgcacgccccagtgcttcacgagcaaaacgttcactacccagcaactgaatattcgccagcgtctgagctgcaaaggcttcgtgcatatcgatcaatgtcagatcgctcatcgtcaaaccggcacgctccagcgccagcggtgttgaccaggctggaccgagcaacatgtcctgccagacatcaatcgcagtaaatgcgtagctgcgcagataccccagcggcaccagccctaattctttcgcccgggattcagtcatcaggatcaccgctgccgcgccatcggtcagcggcgtactgtttgccgccgttaccgttccgtgtttgcgatcaaacgccgggcgcagctttgcgtaatcggcaagcgaggaattaccgcgaatattgttgtcttcgacaagcggttgtttataaggagggataaaggcagtcatcacctcttctttgagttttccgtctgaccatgcctgagcggcacgctgatgcgaacggtgcgctaatgcatcttgctgttctcgggtgatgccgtaggttttcgccatttgctctgcggtgtcgcccatccgcaagccggtagaatattctgctaccgcaggtggtacgggcattaagtcgcgcaaacgcaggcgagagaagagtttcagtcgctggctcatggtacgagctttgttgacatcaaccagcacgcgcgccagttttttactgacgccaattggcaataccgaagaggaatctgccccaccggcaatccccgctcgaatagttcccgccatcaggctttctgcgacgtttgcaactgcctggaaactggtagcgcaagcgcggctgacgctgtaagcatcggtatgtacattcattcccgtaccgagaacaatttcacgcgcaatgttgggggcttcaggcatttgtacgacctgaccaaagaccagttgttcaatcacttcggcggggatctcgctgcgtgccagcagttcgcctaccaccatcttccctaaatcaaccgcgggaatgccatgaaaagccgtcgcctgacgggcaaaaggcgtacgtaaaccgctaacaatggcgatacgatcgccctggcgggtaaccagcggtaaaacctgacccataacactcccctgtaaaaaaataaataaagtggtctgacctgatcatagtcttaaccatttttttacatttagccaagtggagaaaagggaaagtgggagctatgacacagagagaaaagaagaagagaaaagaaaacgcccctgccagcaactgacaggggcgtacgtacccgagaggaattaacgcagacccagctggaaaatcagcatttcagcttcgcaggcaaaagtgaaatcgatatccaggcgcacaccgtcagactcttcagtgaaagtcggggtgattttgcaaggttcagattccacgctacgggctttttcagtcagcgccgccagcgtttgctctgcttctgcgcggtttgcaaacacgcggctgtaagacgcggtgcagtcggagttgtccataatggtgccaacatccatacagcagcaaaccggggtttcatcagcactacatttactcatcgttgatttcctctgtatgtgcacccaaggtgccagataaacgttgtggatattttacgcttccggaaagtgctgctccagttgttaattctgcaaaatcggataagtgaccgaaatcacacttaaaaatgatctaaaacaaaattcacccgaatccatgagtgcgccacctccaaattttgccagctggatcgcgtttcttagatcatatttgaaaaaagatagaaacatacttgcaacattccagctggtccgacctatactctcgccactggtctgatttctaagatgtacctcagaccctacacttcgcgctcctgttacagcacgtaacatagtttgtataaaaataaatcattgaggttatggtcatgagccagaaaaccctgtttacaaagtctgctctcgcagtcgcagtggcacttatctccacccaggcctggtcggcaggctttcagttaaacgaattttcttcctctggcctgggccgggcttattcaggggaaggcgcaattgccgatgatgcaggtaacgtcagccgtaaccccgcattgattactatgtttgaccgcccgacattttctgcgggtgcggtttatattgacccggatgtaaatatcagcggaacgtctccatctggtcgtagcctgaaagccgataacatcgcgcctacggcatgggttccgaacatgcactttgttgcaccgattaacgaccaatttggttggggcgcttctattacctctaactatggtctggctacagagtttaacgatacttatgcaggcggctctgtcgggggtacaaccgaccttgaaaccatgaacctgaacttaagcggtgcgtatcgcttaaataatgcatggagctttggtcttggtttcaacgccgtctacgctcgcgcgaaaattgaacgtttcgcaggcgatctggggcagttggttgctggccaaattatgcaatctcctgctggccaaactcagcaagggcaagcattggcagctaccgccaacggtattgacagtaataccaaaatcgctcatctgaacggtaaccagtggggctttggctggaacgccggaatcctgtatgaactggataaaaataaccgctatgcactgacctaccgttctgaagtgaaaattgacttcaaaggtaactacagcagcgatcttaatcgtgcgtttaataactacggtttgccaattcctaccgcgacaggtggcgcaacgcaatcgggttatctgacgctgaacctgcctgaaatgtgggaagtgtcaggttataaccgtgttgatccacagtgggcgattcactatagcctggcttacaccagctggagtcagttccagcagctgaaagcgacctcaaccagtggcgacacgctgttccagaaacatgaaggctttaaagatgcttaccgcatcgcgttgggtaccacttattactacgatgataactggaccttccgtaccggtatcgcctttgatgacagcccagttcctgcacagaatcgttctatctccattccggaccaggaccgtttctggctgagtgcaggtacgacttacgcatttaataaagatgcttcagtcgacgttggtgtttcttatatgcacggtcagagcgtgaaaattaacgaaggcccataccagttcgagtctgaaggtaaagcctggctgttcggtactaactttaactacgcgttctgataacgcgttcgcctggataaagtcacctgcatagcaggtgactttaactcccccacttcaccgaaagtagtgtcctcattgcttacctcctgagttttgcaaacagcctgttggcagcttgccctttcaaatcaataagcggtatccacagacaaacctgaagggaaaggcatattttcaggcgttctgctcgtccttctcaaagagtttacttttctgcatttccaggatactccccccccctggctattgtgcgctcatacactcaaattaaagataggttctaaataaatgagcgttttttgatagtctatttcattaggtaatatatatttgtaacaaatcaatcaaaatggaataaaatcatgctaccatctatttcaatcaacaataccagcgcagcttacccagaatccatcaatgaaaataacaatgatgaagttaatggattagtacaagagttcaaaaacctttttaatggtaaggaaggaataagcacctgtattaaacatctacttgagcttataaaaaacgccatacgagtaaacgacgatccttatagatttaatattaataattcctcagttacttatattgatattgactccaatgatacagaccatattactattggtatcgacaaccaagaaccaatagaattacctgcgaactataaagacaaagaactcgtccgtactatcattaatgacaacatagttgagaagactcatgatatcaataacaaggaaatgatcttcagcgcattaaaagaaatatatgatggagatcctggttttatcttcgataagatatcacacaaactcagacatacggtaacggaatttgatgagagcgggaaaagcgaaccaacggacttatttacctggtacggtaaagataaaaaaggcgactctctcgctattgtaattaaaaataaaaacggaaatgattacttatctctcggttactacgatcaggacgactaccacattcaaagaggaattcgtattaatggtgatagtctcacccaatattgtagtgaaaacgccaggagtgcttcagcgtggtttgaaagcagtaaagctatcatggcagaatcatttgcaactggttccgatcatcaggttgtaaacgagctcaacggggaaagactgagagaaccaaacgacgtttttaaacgttatggtcgagcaataagatatgattttcaagtggacgatgcaaaatataaatgcgaccatctaaaagaaatagtttctactttagtcggtaacaaaattaacgttggccattctcaaaaaatatataagcattttaaggatctcgaaggtaaaattgaagaaaggcttcaaaatcgccaggctgaatatcaaaatgaaattaatcaaccatctgcgccaggtgttaattttgatgatatttaaaattatttttccagttttttgatttttcaacagctgaatatcggaaatagtcagtgacgaacatcagtatttttacataattacgtctaggtcattgtcggtttatctccttttacttgtggtaattgagggataacaacaaaaaaggtgagttttgcgactcaccttttttatttgtttcttattcagaatcaatatcttttaaatcatcctgaatcgcttgtgcgttcggattttcctgcggtttgagttcgccgccattagcgatgaaatcatgacgctggaagtacgcttcgcgcaccataatataaggatcggacgactgacgcagcagaccatcggaatccagcagctgagcgcgggtttcgatcccttcaagcgtccatttacccacagacatcggccaggtcagccaggaaagaaccgggtaaaaaccatccgccatatcaccaccgtcatcacgcagcgtgaagctaccgtagaacggtaactgaacgtaaggcccataacccacgccataatgaccaagcgtactaccgaagcggtgaggttcagtccgttgcagtttcgggttcgccatccctgcaacatcaataaaaccgcccatccccaaaatggtgttcaggaaaaagcgggtaaagtggaccatcccctgataagggtcgccctgcaagaagtagttaaccatcaccgcaggttcttcaaggttgccagtaaagttgctcaaaccgttacgcgccggttgcggaacataatcacgccaggcgacagcgaccggtcgaacaatatacgggtctaatacattgaagttgaagttgtacatggtgcggttgaacccttctaacgggtcagaacgcccttgctgatctgtaccggaactcgcacaccccaccagaagcgtagttcccagagcaagcgccgacaggcgaagcttcataaatgtctccctgtttttttatggcttatgcagtttgccatccatgacggaacgataccgtatccgcctgtttaggtgtgggcgattgtaacagcacgtcaactgatgtccagacgccctgatttgctgatttgatcatagcctggtaatcgccgccctgtaggctacttgattctatagaaacagaaaaaggcaaacgcagccttttctacattttcagagtaactcccgtcagttgcgagcaaaaaagccgctacgctttagctatacgtgctaattcaagagaagagaccatggacaacgacaaaattgatcaacacagcgacgaaattgaagttgagagcgaagaaaaagagcgcggcaaaaaaatagaaatagatgaagaccgactcccctcccgggcgatggcaattcatgagcatatccgccaggatggtgaaaaagagctggaacgcgacgcaatggcgctactgtggtcagccattgcggcgggtctgtcgatgggcgcttcgttactggcaaaagggatatttcaagtcgaactggaaggtgtgccgggcagcttcttgctggagaatctcggttatacctttggttttattatcgtcattatggcccgccagcaattatttaccgaaaataccgtgactgcggtactacccgtcatgcaaaaaccgacaatgagcaacgtcggcttacttatacggttatggggcgtcgtgctgctgggtaatattctcgggacaggtattgcggcgtgggcatttgaatatatgcctatcttcaatgaagaaactcgcgatgcatttgtcaaaatcggcatggatgtgatgaagaacacccccagcgagatgtttgccaacgcgatcatttccggctggctgatcgccactatggtttggatgtttcctgcagcgggtgcggcaaagattgtggtgattatattgatgacctggcttattgccctgggtgacaccacccatatcgtggtcggttctgttgaaatcctctatctggtgtttaacggtacgctgcactggagcgatttcatctggcccttcgcactacctactttagcggggaacatctgcggcggcacctttatcttcgcgttaatgagtcatgcacagattcgtaacgacatgagcaataagcgtaaagcagaagcacgccaaaaagcagaacgtgcggaaaacattaagaaaaattataaaaacccggcataaatggcgagggtttaagcaatcgagcggcagcgtacttaccccgcactccattagcgggtatactcatgccgcattgtcctcttagttaaatggatataacgagcccctcctaagggctaattgcaggttcgattcctgcaggggacaccatttatcagttcgctcccatccgtaccagtccgcaaaatcccctgaatatcaagcattccgtagatttacagttcgtcatggttcgcttcagatcgttgacagccgcactccatgacgggtaaaaagtggataaaataattttacccaccggatttttacccatgctcaccgttaagcagattgaagcagcaaagccgaaagaaaaaccataccgccttctcgatggtaatggcctgtacctttatgtccctgtgtcagggaaaaaggtatggcagcttcgctacaagattgacggtaaggagaaaatcctgaccgtcggaaaatatccgcttatgactttgcaggaggcaagggataaagcatggactgcgaggaaagacatctcggttggcatcgatcctgtaaaggcgaaaaaggcttcgtctaacaacaattcctttagtgcgatttacaaggaatggtacgagcacaagaagcaagtatggtcagtagggtatgcaactgaacttgccaaaatgtttgacgacgacattttacctatcattggcggccttgaaattcaggatattgagccgatgcaactgctggaagtaatccgcaggtttgaagatcgcggtgcaatggaacgagccaacaaagcacgcagaagatgcggcgaggttttccgttacgctattgtcaccggaagggctaaatataacccggcacctgaccttgctgacgccatgaagggataccgcaagaagaacttcccgtttcttcctgcagaccagatcccggcattcaacaaagcactggcaacattttcaggaagtatcgtatcgctcattgcgaccaaagttttacgctacacagccctaagaacgaaagagcttcgttccatgctatggaagaacgtcgattttgaaaataggattatcaccatcgacgccagtgtgatgaaaggacgcaaaattcatgtggttcctatgtcagaccaggtagttgaacttctcactacgctaagctccatcaccaaaccagtctcagagtttgtttttgccgggcgcaacgataagaagaagccaatctgcgagaacgcggtactgcttgtgatcaaacaaatcggctatgagggtctggaaagcggtcacggattcaggcatgaattcagcacgattatgaacgagcacgaatggcctgctgacgctattgaagtgcaactggcacatgcaaacggcggatctgtgcgtgggatttacaaccatgctcagtatctcgataaacgcagagaaatgatgcaatggtgggcggactggcttgatgagaaggtggagtgagcgaccttaacaactatcgaatagcacaaagtcttgcaatccagtgcaaagctttgtgtgtataagttttgtctcatcaaccacagcaagtatcgatcgattaagacttggatgatagacttcattcctttgattattagctgatagaagaaatgttaaagctatttgcaaagtacacctctattggtgtgctgaacacccttatacactgggtggtttttggtgtttgtatctatgtcgcgcatacaaaccaagctcttgcaaacttcgcaggtttcgttgtggctgtgagctttagcttcttcgcgaatgcaaaattcacattcaaggcatcgactacaacgatgcgctacatgctatatgttgggttcatggggacactgagtgctactgttggatgggctgctgatagatgcgcacttcccccgatgataactcttgtcaccttctccgccatcagcctggtgtgcggtttcgtctattcaaagttcattgtctttagggatgcgaaatgaagatatctcttgtagttcctgtcttcaatgaagaagaagcgataccaattttttataaaacggtacgtgaattcgaagaattgaagtcatatgaagtggaaatcgttttcataaatgacggcagcaaagacgctacggagtcaatcattaatgctctggctgtttcagatcctctagttgttccgctgtcatttacacgcaactttggtaaagaaccagcattgtttgcagggttagaccatgcaaccggggatgcgataatcccaattgatgttgacctgcaagacccgattgaggttattcctcatcttattgaaaaatggcaagcaggtgctgatatggttcttgctaaaagatctgaccgctcaactgatggacgcctgaagcgaaaaacggctgagtggttctataagctccacaataaaataagcaatcctaaaattgaagagaatgttggtgatttcaggctgatgagccgtgatgttgtcgaaaatattaaacttatgccagaacgaaaccttttcatgaaaggtattctgagctgggtaggaggaaagacagatattgttgaatacgtgcgagcggaaagaattgctggagatacaaaatttaatggatggaaactttggaatttagcacttgagggtattacaagcttttccacattccctcttcgcatctggacatacatagggttagtggtagccagtgtagcatttatttatggggcgtggatgattttagatactatcatatttggaaatgctgttaggggatatccttcactacttgtttcaatactgtttttaggtggaattcagatgattggaataggagtattaggtgaatatattggacgcacatacattgaaaccaaaaaacgcccgaaatacatcatcaagagagtcaaaaaatgaataaagcaataaaagtatcattgtatatatcttttgttttgattatttgcgccttatctaaaaacataatgatgttaaatacatctgatttcggaagagccattaagccattaattgaagacataccagcatttacatatgacttacctttattgtataaattgaaaggtcatattgattcaattgatagctatgagtatataagttcatatagttatattttgtatacatacgtcctgtttattagcatttttactgaatatcttgatgctagggtgttatcgttatttctaaaagtaatatatatttattcattatatgcgatatttacttcatatataaaaacagaaaggtatgtaactttatttacattctttattttagcttttcttatgtgttcttcatcaacactgtcaatgtttgcatcattctatcaagagcaaatagttataattttccttccatttttggtgtattcattaacatgcaaaaacaataaatctatgcttttgctatttttttcgttgctaataatatctactgctaaaaatcaatttatattaaccccactaatagtgtattcatattatattttttttgatagacacaaactaattattaaatctgtaatatgcgtggtgtgcttgcttgcgtcaatatttgcaatatcttattcaaaaggtgttgttgaattaaataagtaccatgcaacatacttcggtagttatctttatatgaaaaacaacgggtataaaatgccatcgtatgttgatgataagtgtgttgggttagatgcctggggtaataaattcgacatatcatttggcgcaaccccaacagaagttggaacggaatgtttcgaatctcataaagatgaaacgttttcgaatgcactctttttattggttagcaaaccaagcaccatcttcaaacttccatttgatgatggtgtgatgtctcagtataaagaaaattatttccatgtatataaaaaactacacgtaatatatggagaatcaaacatactaacgactattactaacataaaagacaatatatttaaaaacattagatttatatcattgttattattttttattgcttctatttttattagaaataataaaataaaggcatctttatttgtagtatctctttttggaatatctcaattttatgtgtcatttttcggggaaggatatagagatttaagcaagcatttatttggaatgtatttttcgttcgacctttgcttatacataacagtcgtttttttaatttataaaataattcaaagaaatcaagacaatagcgatgtaaagcactaagtttaaattgcgcgccaatcatggcgcgcacaagctataataccaacctaatttctcctcctcttagagtgactatatctcctgatagaattgcggtattgactatcaaatgccctgattcgttgtttattgtaatatctcctctatctgcagacgataacttaaatgcatcattgcccacaacaaaccccctccagaaccaagtgctgatattatcatcaacagtgatagatacatatactaactgattatcgttataagtgattcctgtcttatacttaacataaggacttccactttgattctcgatagacacataacatccaggggttatgtttgtatgcgtcccgcgactatcgccccattaacgccatacgataaatgggatggtgagaaatgggtgacggataccgaggcacagcatagcgtcgcagtagatgcagcagaagcacagcgccagtcgctgattgatactgcaatggcttccattagtctgattcaactgaaattacaggctgggcggaagctgatgcaggcagagacctcccgacttaacactgtgctggattacattgacgcggtgacggcaacagataccagcaccgcgccggatgtcatctggcctgaactgccggaggagtaggccattcaatatctggcgcactggaagtatcgaccagctccagtgcgtccagataatccagccacaaattatattgcgccagttcctcacctttcagacgaccaatagccgctttaccagcccattgtttactgttcatataatcgttggcctgattaatcaattgctgctttttcagttcggctgcagcaatctgttcctcatgtgttggtggtggaatttcagaccatgcaggaaaaccattttctccagcgatacggatttttcctttcggcggtaatccggaaaactcaatatacacttgctcatcaacttcaacagcatcatctggccatgagccagcttgcgtgtaatcctctttcatctccaagggatagaaagagtttgtagtcgcggaatatatgtaattcatttttcactccataaagttaaaagaaattaacaccctaatgcgaaaaatgaagcaccgataccgggtacgcctgctctggaaataaatttcaccgggtcctggttataaccggcacaagctatatagccaacatttgcactgccgggagtgtaatcctgagtcgcaaatacccgcagacatctattcggaaatgcaatcggaaaataggttactgtgtcctgagacgtcagcggaacatcaattggcccccattgaataattaaaccggatggcaatttttgatatccaggaactgaagcagaaagcataaaactacccatatcaggtatctgattcgcccctgtccctacatttcttttagccgcttctcccaaaccaaggttttcgagagccttttgcaccgtgccgtccaatttgatatcgccaaacggattcttgcggcttaacagcagcgcacgaagcgcggtaagcagctggtcatgccgccccttctccaggctggcaccggaggcctccacaacgctgcaaagctcctcctgcaacatgtcaaagtagtcatcatccagatcggtggcaggcgtgccggtctgggggttaccacgggtacgggggattaccaaaggcagcacctttaagctccgcaagacgttctgaccagtcatgcgccagcgcgttgtcttccgcagtgtaatacgcggcacatttggcgttatcaccatcagtaaacagatccagaacaaacgggccaaacagggtgttaattccccagaaaatgttgtccggcgtgcgccactgatcgcccacttccttcagttcatgggctggtttgttccgcagctccaccagcgcctggcaatatttattactcattaagcccccacgtaattccctgagagataccactcttcacctgatgcagcccgcttactgcttttccgtaaacaccgttcacgacgcgccagaaaattgtttcgttctggctgggagtggctttcacggaatgccgccatccacaccgttgcagcacgacggtataagcccctggactccagttcttccgcctggcgggtcaggcacaaaatcacccgcgggtcgttagtgccgacatagaaattgcgcacaggtctggtttcacgaactggttgtggttccggatcctgcgctctctcagtcaggcgcgggaaatgtctgtgtgtatctccttcacaacggtgagccacacgcccactctgacgtaacttgcttgctgactgcagaacgcgctgccgtgagtaacctgcaaaagcatccgcaatgtctccggaagtacagcccggatgggcttcaatgaatttctgaacgtcattcaaaagactcatgctcaccccctgaatcctgccgggatctggctgtagtccacattgtcgtaactggctttgaagtacgggtcttcgcgtttttctgtgtacgtgctgacggacggcgataagcgcagggaaagctcatcccatttttcccgcagcttcgacgggctgagcacgttacggcaccagaacggatcgcggctgacgcggctgtacatctcgcagatttgtttgtgagtacgaccatcctgcacacacatcaggcgaatttcgtttgcccaggctgtccagttcggttctttgggacgaaccacctcgccgtcacattcggcggcctgctcgtacagggcgatgatttttttccagagccactgtgcgcaggtcaaatcatcctgcgttccccactggcgctttttagggctgaatacaaccgcatcaggatggcgagttaaaaaatcctgttcatccgtctgcgtgtccggttgcgaagcgtccggacgagaaggttttttatctgacggatcatgttttgattttactgacggatccccgccagattctgacgggtgaaaacccgattttttgccagatttcgacgcatcaaattttgacgggtcagattttgatgcgtcagattttgacgggtcagagtctgacagttgagaaaatgccgctgcctgaagcttcgcaacgttaagctgataaacattcgacgcattgcggttatgatgaggagcagcaaaatggctagcgaacgcagtactgatgtgcaggcatttatcggggagctggacggcggcgtatttgaaaccaaaatcggcgcagttctcagtgaagtcgcttccggtgtgatgaacacgaaaaccaaaggtaaggtctcactcaacctggaaatcgaaccatttgatgagaaccgtctgaaaatcaaacacaaactctcatatgttcgcccgactaaccgtgggaaaatttccgaagaagacaccaccgaaacgccgatgtatgtcaatcgcggtggtcgcctgactattctgcaggaagaccagggacaattactgactcttgccggtgagcctgacggaaaactccgcgcagcaggtcattaatatcattcttaattaactaattatttatctcatcactgaatatcttaatatagtgaggacttattatgtctcagaacttagacgcaaccgcaattaatcaaatccatgcccttatttctgctcagggtgttaatgaaattatcagtaagattggtgccgatgctgtggcattgcctgagaatttccgcattcatgatctggaaaaatttaatttaaatcgcttccgtttccgtggtgcgctttccactgccagcatcgatgactttacccgttattctaaagatcttgcagatgaaggcacccgctgctttatcgatgctgataatatgcgtgccgtcagtgtgcttaacctgggtactattgatgaaccaggtcacgcagataacaccgccactctcaaactgaaaaagacagcaccgttctctgccctgttgtctgttaacggcgagcgtaactcccagaaatcactggcagaatggattgaagactgggccgactaccttgtgggctttgatgctaatggtgacgccattcaggcaacaaaagcggctgcggcaatccgtaaaatcacgattgaagcaaaccagaccgctgattttgaagataatgacttcagcggcaaacgctccctgatggaatctgtcgaagcgaagaccaaagacattatgccagtggcatttgaatttaaatgcgttccgtttgaaggtctgaaagaacgtccgtttaaattacgcctcagcattatcactggcgatcgtcctgtactggttctgcgcattattcagctggaagcggtgcaggaagatatggctaacgaatttcgtgatctgcttgttgagaaattcaaagacagcaaagtagaaacctttattggtactttcaccgcctgatttcattactgcaaatgcccctgcgggggcatttatggaaacgtaattaactcaataatcaccggatggtgagggcttccttttacccaaactcagcgcggtgcagcgcatatacgtggagaacaaaatgtcatttattaaaactttttccgggaagcatttttattatgacaagataaataaagacgacatcgtgattaacgatatcgcggtttccctttcaaatatctgccgctttgccggtcatctttctcacttctacagtgtcgcccaacatgcggtgctttgcagccagctggtgccgcaggaatttgcttttgaagcattaatgcatgatgcaacagaagcgtattgccaggacatccccgcaccactgaaacgccttcttcctgactataaacggatggaagaaaaaatagatgcagtaatccgtgagaaatacgggttacctcctgttatgagcacgccagtgaaatatgccgatctcattatgctggcaaccgaacgccgtgatctcgggcttgatgatggctctttctggcctgtactggaaggcatcccggcaacagagatgttcaacgtgattccactggcaccgggtcatgcctacgggatgtttatggaacgttttaacgatttatcggagttacgcaaatgcgcatgaatgttttcgaaatggaagggtttcttcgcgggaaatgtgtaccgcgagatctgaaagtgaacgaaacaaatgctgagtacctggtacgtaaattcgacgcgcttgaagctaaatgtgcggcactggaaaacaaaataataccagtgtcagctgaactgccaccagcaaatgaaagtgttctgttatttgatgctaacggagaaggctggctgattggctggcgttctctctggtacacctggggacaaaaagaaaccggagaatggcagtggacatttcaggttggggaccttgaaaacgtcaatatcactcactgggcagtaatgccaaaagcaccggaggctggagcataatgaccacatttaccaataaagaactgattaaagaaatcaaagaacgaatcagcagcctagaggttcgagacgatattgagcgccgtgcttatgaaatcgcactcgtatctctggaagtagagccagatgaacgcgaagcctatgaattattcatggaaaagcgtttcggtgacttagtagatcgtcggagagcaaaaaacggcgataacgaatacatggcatgggatatgactctcggttggatcatctggcagcaacgagctggtatccatttttcaacaatgtcacaacaagaggtgaaataatagagccatacagcctcacactcgatgaggcctgtcagtttcttaaaatatcctgatctaccatcgccgtcatagagcgtatttttattacctgatttgcaggttcgattccctattcggagatagcactcatgcaacacgaactacagcctgattcactggttgatttgaaattcatcatggctgatactggctttggtaaaaccttcatctatgaccggattaagtcaggcgacctgccaaaagccaaagttatccacgggcgagcaagatggttatatcgtgaccattgtgaattcaaaaataagctcttaagccgcgccaatgggtaaaatagcgggtaaaatatttctcacatctaaaaaacaccattccaatcaatcccctgctgcttcaagtagatgtctgcaggggacaccatccttgtgtttatccctaaaaccacataaaaaccgtaaattaaattcgaactagcaggccgaataaggcacaccaggaactcgtggttttattcattatgaagtggtttttacctgttctcttagccagataataaacgcttcaatttttggccactgcctgcccggtaatgtggtgatgtaataatgctgatggcatttcaccgtcatatcgccaaacggcgcgacgagctcaccactggcaagccttttttgtaccaggcgttttcttcccatcgccaccccaatatgattcatcgcggcaataacagctaaatcagaacgatcaaagccaattccagaagatgtcggcaaattaaccgcataatgttgcgcccaactatgccattcatccgtaccggagtcgttgctccatgcctgtctgtcatggagcaacgtacagtgacacaggttaattaccgtgttggttaaagcatgtctttgagcgtattccgggctacatactggcaggatttcttcatccatcagaaagtgatgagtgagttgcgctgacggcgcatcatcaaagtagatcgccaaatcgattccggcacgttgcagattgacgttgtcattaccagtgagcacggtgagcgaaatagacggataccggcgtgtaaagtcacctaatgcgggcaccaaccagcattgggcgatagagggccgggaatacagagttaacgttcccgataactcctgatttttgatatcaagaatttcctggttcagggtatccagcgacgattttagcgcccaataaacacgtttcccctcgtgcgttaattccactttgcgatgggaacgaacaaacaactgaatgcccaattcttcttccagctgattgatacggtgacttaccgcactggggctcagcgacaattcctctgccgccagggcgaaggactgatgcctggcagccacttcaaaagtatgcatttttgataattgccagccgttaagcagccgatttcttatttcacgaaggggttccataatcacctcatttttcgcttaagtgtaaaaaaatagcggcaaaatttcagctatgagatgagctaaagtgaaccatatctcaattcaccttcatttttagatgtaaatcactccattgatgcaatttacctcatgtgaaaggcaaattttatcgtttgtcagcctgcgttgtttttttgtccaatatcatcaggttaatcacaggggaaggtgagatatgcactctcaaatctgggttgtgagcacgctgcttatcagcatcgtgttaattgtactgaccatcgtgaagttcaaattccacccgtttctggcgctgttgctggccagcttcttcgtgggaacgatgatgggcatggggccactggatatggtaaatgctattgaaagtggaattggcggaacgctggggttcctcgcagcggttatcggccttggcacgatactgggaaaaatgatggaagtatccggggccgcagaaagaattggtctgacacttcaacgctgccgctggctttcagttgatgtcattatggtgctggttggcctgatttgtggcatcacgctgtttgttgaagtgggcgtcgtgctattgattcctctggctttttcaattgccaaaaaaaccaatacctcattattaaagcttgccattccgctatgtaccgcattgatggcagtgcactgcgtggttcctccacatccggctgctttatatgttgccaataagctgggcgcagatatcggttcggtgatcgtctacggtttgctggttgggctgatggcatcactgatcggtggcccacttttccttaaatttctgggtcaacgactgccctttaaacctgtacccacagagtttgcagatctcaaagttcgcgatgaaaaaacactaccgtcattaggcgcaacgttattcaccatactgctacccattgcgctgatgttggttaaaacgattgccgaattgaatatggcgcgtgagagtggtttgtatatcttggttgagtttattggcaaccctatcactgccatgtttatcgccgtgtttgtcgcctattatgtgttgggtatacgccagcatatgagcatggggacgatgctcacacatacggaaaatggcttcggttctattgctaatattttgctgattatcggggccggaggcgcattcaacgccattttaaaaagcagcagtctcgctgatacgctggcagttattctctccaatatgcatatgcacccgattcttctggcctggttagtggctcttattctgcatgcggcagtgggctccgctaccgtggcaatgatgggggcaacggcaattgttgcacccatgctgccgctgtatcccgacatcagcccggaaattattgcgattgctatcggttcaggtgcaattggctgcactatcgttacggactcgcttttctggctagtgaagcaatattgcggcgctacgctcaatgaaacatttaaatactatacgacagcgacatttatcgcttcagtcgtcgctctggcgggcacattcctgctgtcatttatcatctaagcgcaaagagacgtactatggaaaacgctaaaatgaactcgctcatcgcccagtatccgttggtaaaggatctggttgctcttaaagaaaccacctggtttaatcctggcacgacctcattggctgaaggtttaccttatgttggcctgaccgaacaggatgttcaggacgcccatgcgcgcttatcccgttttgcaccctatctggcaaaagcatttcctgaaactgctgccactggggggattattgaatcagaactggttgccattccagctatgcaaaaacggctggaaaaagaatatcagcaaccgatcagcgggcaactgttactgaaaaaagatagccatttgcccatttccggctccataaaagcacgcggcgggatttatgaagtcctggcacacgcagaaaaactggctctggaagcggggttgctgacgcttgatgatgactacagcaaactgctttctccggagtttaaacagttctttagccaatacagcattgctgtgggctcaaccggaaatctggggttatcaatcggcattatgagcgcccgcattggctttaaggtgacagttcatatgtctgctgatgcccgggcatggaaaaaagcgaaactgcgcagccatggcgttacggtcgtggaatatgagcaagattatggtgttgccgtcgaggaaggacgtaaagcagcgcagtctgacccgaactgtttctttattgatgacgaaaattcccgcacgttgttccttgggtattccgtcgctggccagcgtcttaaagcgcaatttgcccagcaaggccgtatcgtcgatgctgataaccctctgtttgtctatctgccgtgtggtgttggcggtggtcctggtggcgtcgcattcgggcttaaactggcgtttggcgatcatgttcactgcttttttgccgaaccaacgcactccccttgtatgttgttaggcgtccatacaggattacacgatcagatttctgttcaggatattggtatcgacaaccttaccgcagcggatggccttgcagttggtcgcgcatcaggctttgtcgggcgggcaatggagcgtctgctggatggcttctatacccttagcgatcaaaccatgtatgacatgcttggctggctggcgcaggaagaaggtattcgtcttgaaccttcggcactggcgggtatggccggacctcagcgcgtgtgtgcatcagtaagttaccaacagatgcacggtttcagcgcagaacaactgcgtaataccactcatctggtgtgggcgacgggaggtggaatggtgccggaagaagagatgaatcaatatctggcaaaaggccgttaataacgtttcaacgcagcatcgcaatcctttccctgggtgagcgatgctgccgatggcgcagacttaagatccccggtcttacccgctataaccccctccttttatcatcacccaacgcctttcgctgtaaacggcggtttcgcaaaccaaaccaaaaccgtaagtaagataaaagcaatagccgccatacggaaaatctcatttgcagaaatagaaagtgactgctgggttatttcattattaatttcattaagaactcctgaaagcgaaccataatatttatccataatttgtgacgatgaattaaacacggggttaaattgatcgatggttgctgtcaactgactatggtgtaacgattcgcgtcgtccccacagcgtcattgtcaacgacgtaccaactgatcctgacaaggtacgaaaaaaattactcatactcgaggcattggcaaatttattatctggcaagcctgaaaacgaaatcgttgttaagggtaaaaagaaacaggcaacggcgaatccctgaaaaaactgcggcaaaatgatgcctgtaaaatcaatcgttggcataaatgtcacagaacgccagtaatagcaaaccgcatacatcaaaaaactaaatgtcactaacaaccgcatgtctattttgttgccataacgtcctatcaaaggtgaaattaatagtggcatgatgccgatgggcgcataagcaagtccggcccatatcgcattataccccatcgtttcctggagtaactgcggcataaggacgatcgctccagagtaaaataaatacgcgcatgtgatactcacaataccaatggtgaagttacgggacttaaacaaactgagatcaagaatcgggttctctgaggtcgactcccaaatgactaaagagatcagagaaataactgatactactgttaatattattattgtactcgagttgaaccaatccagatcgcgccctttatcaagcataatttgcaagccaccaacaccgagcactaacagggtcagtcctggtagattcattttgaccggtgaagtctcagtttctcttcctttaagtaaggttaagcataatgtcaggacgataatccccatagggacattgattaaaaatatccaaccccagctaaagttatcacaaatataaccgcccaatatcggcccacatatcggagcgataatcacggtcattgaccataatgccagagcaaatgttcttttttctggcggataattccttaataataaactctgtgacagtggaattaacggccccgccattaacccctgaacgactctaaaaaatatcagcacatcaagattggtcgataggctacacattaatgaagacagcgaaaaaaaagtgactgaaagtaaaaataatcttaattcgcctattctttgtgccaacctgccagtaacagggatcgcaatggcatttgctacaccaaacgaggtgataacccaggtgccttcgtctgttgatgctcccagaaagccagatattgtcggtattgcgacgttagaaatagtggaatccaacatttgcataaatgtcgctaatgacaatgcaatagtgacgcaccataacgtcccaccggttaatggtgccggagttgatttagtgattgccattaaagttgtccattatgcgaaataatgttgctaatttctttttctatcggactggtatcgataactaaagccttactggtataagccggcatggaggtcacggttgaagccagctcaggcatctcggcaatgtcttcgttcttcgtatcaatagttgctgtcatcgataaaccaatacgcaaggggtgttccatgagttcttttggatcaagagaaacttcaaccggtacacgctgaacgattttgatccagttccctgtcgcattttgtgcaggtaataaggagaacgcattgccggttcccatattgatccctgtcacccgaccatgaaacacaacattttcaccataaagatcgctgataatattgaccgattgaccaatccgtacatccgtgagttgtgtttctttaaagttggcattaacccacatttgacgtgccggtacgacagccattaacgattgtccggggctcactgtttcgccgacctgaacacttctctgggcaatatagccggtaaccggactcttaatatccgtacgtttaagcgccaaccaggcttctttagttgcatccgccgcttcaacgacttgtggctgacggtttaatggtgtgttcattactaaagctttattcgctttataagcctggatagcggcattcaatgccgctttgctacttattaacgtatctttggtatgctccagcgtttcttttgaaataaccccctgcttcgctaacggcactcgacggttataatcttctaaagattgttgatactgaatacgtgctgaagcgacttcggcactgtattgtttatcctgtaagtatagtttattcgtttgccgaacaatatttgccagattatttttagctttattgagtgcgatagtggcatcagttttatccagtgaaactaaaatgtcaccttgtcgaacgtagttcgtatctttatgattaacgacagtgacactacctgagacttgtgcagaaattggatctgcattccccgtgacataggcgtcatctgtactaatcatgtcttctaattccattgaccaataggcataggcacctgaaaacgcaataaataaaactaccgccaataaagaaaagtattttcttctgttagaatgttttttatttgaattaatctgttccactattatctctcatttctcatagatgaaatttatgaattgaatgaaaagagcattcattcttcatatcaaacacagtgcatgtgttgcacattatcccaggaacgttggaggcctaatttaaatgaggtgcaaaaaaaacaacagaggactaaaccgtggcttttgcaatacaattcttacgcctgtaggattagtaagaagacttatagtgccaacttgaaactataaatcatcggtacaatccctgattttattgttgacatttcatttatgccgactatttatatggtatacttgtcgaattatcttaaaggaagctcagattttcttatttttattgagaaaatgagatgacgccttatgtctgtattactacagggagaagggagatgcttcattgcaaagggaataatctatgaacgcaataattattgatgaccatcctcttgctatcgcagcaattcgtaatttattgatcaaaaacgatattgaaatcttagcagagttgactgaaggcggaagtgccgttcagcgggtggaaacacttaagcctgatatcgtcatcattgatgtcgatatccccggagttaacggtatccaggtgttagaaacgctgaggaagcgccaatatagcggaattattattatcgtctccgctaaaaatgaccatttttacgggaaacattgtgctgatgctggcgctaatggtttcgtgagtaaaaaagaaggcatgaacaatatcattgcggctattgaagctgcaaaaaatggctactgctatttccccttctctctcaaccggtttgttggaagtttaacgtccgaccagcaaaaactcgactccttatcgaaacaagaaattagtgtcatgcggtatattcttgatggcaaggataataatgacattgctgaaaaaatgttcatcagcaacaaaactgtcagcacttataaaagtcgcctgatggaaaaattagaatgtaaatcactgatggatctttacacattcgcacaacgtaacaaaatcggctaaccacatgaagtttttaccctatatttttcttctctgttgtggtctttggtcgaccataagtttcgcagacgaagattacatcgaatatcgtggcatcagtagtaacaaccgtgtcacacttgatccactacgtctgagcaacaaggaattacgttggttagcgagcaaaaaaaatcttgtgattgcagtacataagtcccaaacggctacgttgttgcataccgattcgcagcaacgggttcgtggtattaatgctgattatttaaatcttttaaaaagagcgttaaatatcaaattaacactccgggaatacgcagatcatcaaaaagcaatggacgcgcttgcagaaggtgaagtcgatatagtgttatcacatttagttacttcgccgcctcttaataatgacattgctgcaaccaaaccattgataattacctttccggcgctggtaaccacctttcacgactcaatgcgaccgcttacctcaccaaaaccagtaaatattgctcgggtagcaaattaccccccagacgaggtaattcatcaatcatttccaaaagcaacaattatctcttttacaaatttatatcaggcattagcatccgtctcagctgggcacaatgattactttattggtagtaacatcattaccagcagtatgatttcccgctatttcactcactccttaaatgtagtgaaatattataactcgccgcgtcaatataattttttcttgaccagaaaagaatctgtcattcttaatgaagtactcaatagatttgttgatgctttaacaaatgaagttcgctatgaagtatcacaaaattggcttgatacaggaaacctggcctttctgaacaaaccattagaactcactgaacatgaaaaacagtggattaagcagcatcccaatttaaaggtgctggaaaatccttactcgcccccctattctatgacggatgaaaatggctcggttcggggcgttatgggggacattcttaatattattaccttgcaaacaggtttaaatttttctccgatcaccgtttcacacaatatccatgctggaacacagcttagccccggaggatgggatataatacctggcgctatttatagtgaagatcgagaaaataatgttttatttgctgaagccttcataacaacgccttacgtttttgtcatgcaaaaagcgcctgacagtgaacaaacattaaaaaaaggaatgaaagttgccattccatattattatgagctgcattcgcaattaaaagagatgtatccggaggttgaatggatacaggtcgataatgccagcgctgcatttcacaaggttaaggaaggtgaacttgatgctctggtcgcgacacagctaaattcgcgttacatgatcgatcattactatcctaatgaactttatcattttcttattcctggcgttccgaatgcatcgctttcgttcgcttttcctcgcggagaaccggaacttaaggatattattaataaagcactgaatgcaattcccccaagcgaagttctgcgcctgacggaaaaatggattaaaatgcccaatgtgaccattgacacatgggacctatatagcgagcaattttatattgttacgacattatccgttttattagttggcagtagccttttatggggattctacctgttacgctcagttcgtcgtcgtaaagtcattcagggtgatttagaaaaccaaatatcattccgaaaagcactctcggattccttaccgaatccaacttatgttgtaaactggcaaggtaatgtcattagtcataatagtgcttttgaacattatttcactgcggattactacaaaaatgcaatgttaccattagaaaacagtgactcaccctttaaagatgttttttctaatgcgcatgaagtcacagcagaaacgaaagaaaatcgaacaatatacacacaggtatttgaaattgataatggcatcgagaaaagatgcattaatcactggcatacattatgcaatcttcctgcaagtgacaatgcagtatatatttgtggttggcaagatattactgaaacgcgtgatctaattaatgcactcgaggtagaaaaaaataaagcgataaaggctaccgtagcaaaaagtcagtttctggcaacgatgagtcacgaaataagaacaccaataagctctattatgggcttcctggaacttctgtcgggttctggtcttagcaaggagcaacgggtggaggcgatttcacttgcctacgccaccggacaatcactcctcggcttaattggtgaaatccttgatgtcgacaaaattgaatcgggtaactatcaacttcaaccacaatgggtcgatatccctactttagtccagaacacttgtcactctttcggtgcgattgctgcaagcaaatcgatcgcattaagttgcagcagtacgtttcctgaacattacctggttaagatcgaccctcaggcgtttaagcaggtcttatcaaatttactgagtaatgctctcaaatttaccaccgagggggcagtaaaaattacgacctccctgggtcacattgatgacaaccacgctgttatcaaaatgacgattatggattctggaagtggattatcgcaggaagaacaacaacaactgtttaaacgctacagccaaacaagtgcaggtcgtcagcaaacaggttctggtttaggcttaatgatctgcaaagaattaattaaaaatatgcagggcgatttgtcattagaaagtcatccaggcataggaacaacatttacgatcacaatcccggtagaaattagccagcaagtggcgactgtcgaggcaaaagcagaacaacccatcacactacctgaaaagttgagcatattaatcgcggatgatcatccgaccaacaggctattactcaaacgccagctaaatctattaggatatgatgttgatgaagccactgatggtgtgcaagcgctacacaaagtcagtatgcaacattatgatctgcttattactgacgttaatatgccgaatatggatggttttgagttgactcgcaaactccgtgagcaaaattcttccttacccatctgggggcttacagccaacgcacaggctaacgaacgtgaaaaagggttaagttgcggcatgaacttatgtttgttcaaaccgttgaccctggatgtactgaaaacacatttaagtcagttacaccaagttgcgcatattgcacctcagtatcgccaccttgatatcgaagccctgaaaaataatacggcgaacgatctacaactgatgcaggagattctcatgactttccagcatgaaacgcataaagatctacccgctgcgtttcaagcactagaagctggcgataacagaactttccatcagtgtattcatcgcatccacggtgcggctaacatcctgaatttgcaaaagttgattaatattagccatcagttagaaataacacctgtttcagatgacagtaagcctgaaattcttcagttgctgaactctgtaaaagaacacattgcagagctggaccaggagattgctgttttctgtcagaaaaatgactaaatagcggctcccacaatgttcaaatgtgggagctatttaccagcacatcttacatttatgatgagaactcctggcgaatttgttccccatgctggtcgagcgttgccgctcccggcataacatgcgggtccgcgcagccgctgatttttatcggattacccggcatcattattcccccggcttcaatcaacatatttctcgcctgagtttgtggcaatttaatggcctcagccacacttaataacggcgcgacgggtacaccaacttcatgtattctggctaaccaaacttcagctgcctgcgtttttaacgtccgctcaatatattgtttaagaatagcctggttttgtacgcgtaaaatattgctgctaaatcggggatcattaaccagttccgtaagctccagtgcctggcataacgcagaaaaaagcttgtcattaccacaacaaatcgtaatcggcttatcctgagtattgaaaacatcaaaaggtgccatgtagggatggcgatttcccagacgttgtggtgacttcccagttgcgatatatgccatcagaccatgctccagaaaactcagcgtggcatcaaacatcgctatatcgacatgcgcccctctctggctcttttcgcggccataaagtgcactcactattccgctgaataaatagacaccgccgcatagatccgcaagagatgtaccaacgcgcactggcggagcatcaggatatcctgtttccatcattatcccgctcattgcctgaatgatggtatcgtaggcaggagcatcttttagcggaccggtatgtccgaaacctgacgatgaagcatatatgaggcgcgggttgatttcttgaagcgtttcccatgaaaaccccagtttttccattgtacctgggcgaaaattctcagctaatacatcagcttgtttgagcatatttataaatatacttttatcgtgatcattctttaaatcaagaaccacactctctttgccatgattaataaaactgtaatagagtgactgtccatccacatagggaccaaatgtgcgggtatcatcaccatgacccggcggctcaactttaattacccttgcgcccatattacaaagaagttgagttccgaaaggtccattaaggacatgtgtcatatcgataactaataagccttcaaacggccctttgctttcattatttgtcatttgcttatgccttgaaaaaagccgaaggtgaaaagacacttcggcatttatgtaaaatcaataacatgattaattatgaaaccagtcgactgacataaatccacaagggagccgtgacgacaaagcccagtacgctcacagccaatgacgctgtaccagtacgggtgtagacattaaaccggctggcaataatgattccggagaatgccggcggtaatgcgcctgccagtaccatcatctgcagatgttcgctgttcaaatgacatgccataccaacgagaagcagtgccagtggcatcagaatcagcttcaggaaggtgttataagcaatttcggcactgaactcgaatttatgtgcagccagagtcaaccccgcagcgaataccgctacccctgagttagccttcgcaatcagattaaaggttgggtcccatgctgccggaatttttaccccaaccaacaccaggatcgttgccagaacaggtgcccatactactggctcctttgccgcagaaattaatgcgctcagattactattcttcttaccatccgctcctgaagaaggattcagcaaatacagaccaataggaatagtaattgcgttaacaataatagaaataattgctaccactaaacctgttgatacggaatcaccataaataggatcgagaactgcaaaccccaggaatccaatggtaggtgaacctgcaattaatgcacatacagctgcttctgcatgggtacgtttaaaaaatttgtagcaaccgaaccaggagaaaaagaaacatccgacaataaccacaagtgatacaagggtcagacgagtgtccgcaaaaatcatttccctgtttgcccgagtaatagatacaaatagagccgcaggaagcgcgtagtttaataccagtttattaaatgcccgagcttgatcttctgaaaatgtttctcgtctgccgctaaaataacccaacagcatgattacgataataggcaataaatcgccaataaaaaatgttagcataatagtatttccgataagggtcccctcaccatcgcataatgagttggcaagaggagacgatgtcagtatttaattaccagcgacttgttttgggttaagtttggtaatatggccactttcagttcctgctgcagggtcgatgaccacattaataatggtcggtttgcgcgactgaataccggtggttaaagcatgacgaagttcatctgtcgtggtgacgttatagccaacgccacgaaacgcatccattaatttgtcataccttgcatggtgcaacagatccgttggtgatggtgcaccagcgccactgagatcaacaccgtctcctctgtagatgccgccattattaaaaataacgatcgtcaccggcaggttatatcgacaaatcgtttcaatttccatcccactgaaaccaaaagcactatcaccttcaatggcgacaaccggagaaccagaagtcacgctagcaccgatggcatagcccataccgatgcccatgacaccccaggtaccacaatccagacgacgacgtggtttatacatatcaataatatttcgtgcattatccagggtatttgcaccttcattaactaaataaatatcctggttctcgcgcaatacgtcgcgcacagcacttaatgcattaaagtaatttaatggttgagtatctgtacttaatttttcatgcattttttgtgcattttgctgcttgtggatatttaaaatatcgcgccataccagtggagtcgtaaatgtgttttgtttcagttctgccagcataccttgcatactggatgcaatatcaccaacgactggcacagcaatggggcggttgctgtcaatttcctgcggttcaatatccagttgaataaactgtgtatctgccgcccatccttttttaccgtgtgccaataaccaattcagtcgtgcaccaacaagcatgacaacgtcagcatttgccagggcaaacgaacgcgcagctgccgcagaaagtggatgcgtatcttcaaggatccctttcgccatagacattggcaggaatggaatctgagcactttcaataaattcacgaagctgttcatcagcttgtgaatacgccgcgcctttgccaaggataattaatggccgttcagcttttgctaaaagcgaaattgcgctagtgactgacttcgggcatggcaataatgctggcgacggattttcaactttaacaatcgtggttaacgcttcgtctttttccatcgtcgcggccaggacatttgctggcaaatcaagataaactccgccagggcgacccgatacagagacccggatagcgcgtgccaatgcaatgccaagatcctgcggctgattaacgcgaaatgctgctttggcatacggttttgccgcattcatttggtccagctcttcataatcaccttgctgtaggtcgacgatcgcgcggtcgctggagccgctaatcatgatcatcggaaaaccatttaccgttgcgttggccaatgcggtcaaaccattgaggaatcctggcgcagaaactgtcaggcagatccccggtttttgggtaagaaaaccgcttgccgcagcggcatagcctgccgactgctcatgacgaaaaccaatataacgaatgccttccgcctgggcatggcgtgccatatccgtcacaggaatacctacaacaccataaatagtgtcaatattattctgttttaatgcttcaacgatgatatgcataccatctgtcatttgaagttgatctgacatgattaataacctcgaaatttttataaattgggagccagaagcccccgttaatatcagatggcgtggttttgcttcattgcagcaatttcatcgtcgctataacccagctcctgcaatacagcagcggtatgttcacctaatagcggcgcagctttaatatccggcgtaaaggcagagaatttcattggacaaccaacggtcagatattttccacgcaacggttgttccacttcaacaacactgccactttggcgcaaagagggatcaagtgaaatttctttcatacttaaaaccggtgcacaaggaatatcaaactgagtcaaataggccaccgcttcatgtttatcaatagtgacagtgtatttttcgatttcagcaaaaatatcgaaaatatgtggctgtcgtgcatgggctgtactgtatgccggatcggtaatccattctggtttgccgatggctttacaggtgttttcccagttttgctcctgaatagtgaaataaatataggcgttaggatcggtttcccagcctttacatttcaggatccagccaggctgaccgccaccacctgcattaccaccgcggggaactgcatcaccaaatgtaccattcggatactgcgggtattcttccagataacccaatttatcgagacgctgctggtcacgtaatttcacgcggcaaaggttcaatacggcatcctgcattgacatggtgactcgttgcccacgccccgttttttcgcgatgcagcaaagcagcaagtaaaccgatcagcaaatgcattccggtgttgctgtcacccaacgctgcagcgcttaccagcggcggaccatcccaaaaacccgtagtggatgccgcgccacccgctgcctgagcaacgttttcataggcttttacattcacataaggcgaacactcatcaaaccctttgatcgaaccaaaaatcagacgtggattgatttcttgaatatgctcccaggtgaagcccatgtgatcaatggcccctggatgaaagttctcgactaagatatcagcttcgcggatcagcttttccattacctctttgccttccgctgttttggtatttaactcaatagaacgtttgttactgttaagcatggtgaagtaaagcgcatcgatatcaggaatatctcgcagctggtgacgcgttacgtcaccaacgccgggacgttcaattttaataacgtcagcgccaaaccaggccagcatttgagtacaagatgggccagattgcacaccggtgaaatcgagaactttaattccttgaagtggagttgacatagcaatacctattagttaattaaatatgtgttaatttagcgtttatttaaggcgtaatatcttctataaataacccgcaaaatatcgtcgtagctgcactcgatatttttaaaatcctgtatcaagtgctgaaaatcatttcatcgccacttccaattcctttctgcatggtaagtagtgaggacgaaaagaagaatatgataaatattgattcgtggtaatcagagagagtcgcgacatttgtgatgttattcttacaactgtaagaagcgccggtgatttacaagcaagggtatgattacgctttttaaagcgtaccataaaacataacataataaatgatttgtgatgacacgggattattgcggtttactttgaggaatataaaatgcgagtttatagcaccgcgagcgccaaataattttatgaccacaacctgtcgtattgtggtcataaaaaattgtcggctggagggagttaaatcctttacctcaatatactgcctgtcagcattagttcacaaacagtgcttcgctatcgacgatgattccatcttccgcacctttaagcgccaggtttgcctcgtagtattgctttttatcaagcagtttctgcgcatcagcaagtgcattacgagtctgtttaagtggcatcagatattggttttccattacgccaacaccggccaggcgaagctcttccattgcgccctttttatcccctttcgccattttttcattggcaatttttatcgcggcttctttttcgggagttgctacataactctcagaaattccgacagatgcattaatgacaatatattggtcatcattgagattggtctttttacctggcttagcgaactttgcccattcggtactgtcatctgacagcaaagcggaagcttcattggtcagttcttttgccttttctggatcgccatgaaacagagccaggcgcgctacctgcacgtcacgcatcgcatataaaccttgttcagagatacgctctgctgccgctgccgttttctgggtttgctgaacttgctgagtttgctgttgtgccgctaccggagcattatcagcagcccatacagttgaagatgccagaattgctgtgaccatcgtggccataattaaacgtttcatacttacctcattctttaacagttttagaaaacgccgccatcatattgggtgagcatgaaatgagaaatcagagagcaacggtcattttgaaagggttatcttacagttgtagttattatcgcaagaagtattttagtcttacaattgtaggaatatgcttcctgtcgcagagaactattcttatataccacaaagagatgtcatttattatatcgatgtaaatactgattaattaaatgtaaatacagccataacatcgtaggttctcagtgaaccattttcaggataactttctatgaaagtaaacttaatacttttcagcttatttttattggtctctattatggcatgcaatgtttttgcattttccatttcgggtggtggaagtgagaggagctataaagagactgaaaaaacatcagcgatgacgaccacacactctacaaaacttcagccatcacaggcgattttgtttaagatgagagaagatgcgccaccattaaacctcacagaagaaatgccgcccccttttccgacaaaggcgaattatcttattcatcctgtgcgatagcgtctttcacatggcaggtgaacaatcatgtctgatgctgatgtgaacacctgcccaaatgagccatcctgacccactaccgcctgccataccccaccataaagcgaatcatcaagccacaagccggggcaagaaacataaatatccccgtcactagttcattaccgccagttaaccacatggtgaagtaataaatgagtgcagcgaggatcaccatgccgaagaaagaagagaccgccgataccacgttcagtacctgaccgatgtagccgcttacgcagacaatacacagggcgagaaacatccataaattaatcatagctcaacctcctgccgcgctaaaaaacctgtaacttcagtcactttaatagtaagacaatccttaacctctggcaatttttgctaagcatcaatgaaaacagcatgttaaatgcaagactgttgtgtacggaaaaatatttactttgcacgattaataatcagtagctgaaagcagtcagcgagtgataaagtacagataccgcattcatgctcctcgtggttatgtcctgactagtctttacactctttacaggaaccattgtcgtacatgatggcccaaccaattgagtgtaccgctgtcgacatggaatcttctgcgatacaacaattcgtatctacagaaggtaactatgtttccacaatgcaaattttcccgcgagtttctacatcctcgctactggctcacatggtttgggcttggtgtactctggctttgggtacagcttccttatcctgttctctgctttctcggcacgcgtattggcgcaatggcgcgaccattcctgaaacgtcgtgaatctatcgcccgtaaaaacctggaactttgtttcccgcagcattctgcggaagaacgcgagaagatgattgccgaaaactttcgttcactcggcatggcgctggtagaaaccggcatggcatggttctggcccgacagtcgcgtacgtaaatggtttgatgttgaagggttggataaccttaaacgcgcacaaatgcaaaatcgcggcgtaatggttgtcggcgtccattttatgtcgctggaactgggcggccgcgtgatgggactgtgccaaccaatgatggctacctatcgtccacataataatcagctgatggaatgggtgcagacccgtgggcgcatgcgctctaacaaagcgatgatcggcagaaataatctgcgcggcattgtcggtgcactgaagaaaggtgaagcggtatggtttgctcccgatcaggattatggtcgtaaaggcagctccttcgcgccgttctttgcggtggaaaatgtcgccacaaccaatggcacctatgttctctcccgtctctctggcgcagccatgttgaccgtaacgatggtaagaaaagcggattacagcggatatcgtttgttcatcaccccagagatggaaggctacccgacagatgaaaatcaagccgctgcctatatgaacaagattatcgagaaagagatcatgcgcgcaccggagcagtacctctggatccaccgtcgctttaaaacgcgcccggtgggagaatcgtcgttgtacatttaacaaactgctcttactctttccctcctcaaatcggccataataacctcatggtttttatggcttttttcttaaggttttttccttcgctgaatatctaattattaccgtcagaaattaaactgtcgccgatatgagacacttgtaagttactaaaagtaaataagaaaatgcctcttgtctcgtttcagttttaggcgtacattagcgccgtctcgagcagtttagctcagaattctggggtgatgcccacggtaaaatacagggcttttaaggtcgctttgcccggtgtcaactcactgtatcaggtgtaatgaagtcattcaggcgtaacagtaattacgcggagagatgtaaagtgaaatatttctttatgggcatttcttttatggtcatcgtttgggccggtacttttgccctgatgatctaaaagcaaactgtgcaatgaaaaacaggagccatcaggctcctgtttgcatttctgacgacggtgtttattccgcgttttcgtgaatatgtttgctgctggcgggtagtaaaccgtcggcacggaacatcgctttaatccctctgatggcctgacgaatacggtcgcggttttcaatcagtgcaaagcgaacatgcgtatcaccatagtcgccaaagccaatccccggcgagacacaaaccttcgcttcgttaaggagcttcttggcaaattccagcgatcccatggccgcatatggttccgggattttcgcccagacatacatcgaagccttcggcatttcaaccatccagcccgcttcatgcagccctttaaccaatacatcacggcggcgtttgtactgttcggcaatgtcgcgcacgcactgttgatcgccctccagcgccgcaatcgccgccacctgcaacggcgtaaaggtgccgtaatcgtgatagcttttaatacgagccagggcgctgaccagcgttttgttgccaaccataaagccgatacgccagcccgccatgttgtagcttttcgacagcgtaaagaactcgactgccacatcgcgtgcacccggtacctgcataattgacggcgctttccagccatcgtagacgatatcggcataggccaggtcatggaccaccagcacatcgtagcgtttcgccagcgccactactttttcgaagaactccagttccacgcattgcgcggttgggtttgacgggaagccgaggatcatcatcttcggtttcggataactttcacgaatggctcgctccagttcgttgaagaaatcgacaccttccaccagcggcactgagcgtacctgcgccccggcaatcaccgcgccataaatatggatcgggtaacttggattcggcaccagcaccgtgtcaccatgatccagcgtcgccagcatcagatgcgccaggccctctttcgaaccaatagtgacgatggcttctgattccgggtcgatttcaacgtcgtagcgatcctgataccagcgggaaatggcgcgacgtaaccgcggaatgccgcgtgaagtggagtaaccatgcgtgtccgggcgctgggccacagtacataatttttcgacgatatgcggcggagtcgcaccgtccgggttacccatgctgaaatcgataatatcttcgccgcgccgacgcgcagccattttcagttcagcggtgatgttaaaaacgtagggcgggagacgatcaatgcgcgtaaagcgacgttcagggcgagtgtcagccataatttcctcagattaacgttagcgcccggaccgtccgagcgacgctgccacgatggtggctgttttgaaaatagcctgattaatttctgtctgtccagcgttttagaacattttattaatgacgttaaatgaggaactctgctttaaaaacaggaaatttatctgcgctaacaagaaaattaccactcattttattaacataataatttcaataaatttactaaccagaagtgcattatcaagagatgcattgctaatacaccatttatctatcaatccccttttaaaattgtggtttttcctcaaaaacggcctgctggtcatcagccttcaggttacctatcatagaggtttaatccttattcagagtcacccgtgcacgaaatattcaacatgctgctggcggtcttcgatcgggcagcgttaatgcttatctgcctgttctttctcatccgtatccgcctgtttcgcgaactgttgcacaagtcggcgcactccccaaaagaattgctcgccgttaccgccattttctcgctgttcgccctgttcagcacctggtccggcgttcccgtagaaggctcgctggtgaacgtacgtattatcgcggtgatgtccggcgggattctgtttggcccgtgggtaggcatcattaccggcgtgattgcgggtattcaccggtatttaattgatatcggcggcgtgacggcgatcccctgctttatcaccagcattctggcgggttgtatatcgggctggatcaacctgaaaatccccaaagcacagcgctggcgcgtcggtattctcggcggcatgttgtgtgagacgttgaccatgattctggtaattgtctgggcaccaactaccgcgttggggatcgatatcgtctctaaaatcggcattccaatgatcctcggtagcgtctgtatcggctttattgtgcttctggtgcaaagcgttgagggcgaaaaagaggccagcgccgcgcggcaggccaagctggcgctggatatcgccaacaaaacgctaccgctgtttcgccatgtcaatagcgagtcattacgcaaggtctgcgaaattatccgcgatgacattcacgccgatgcggtggcgattactaataccgatcatgtgctggcctatgttggcgtgggtgaacataactatcagaatggcgatgacttcattagcccgactacccgtcaggcgatgaattacggaaaaatcatcattaaaaacaatgatgaagcccaccgcacaccagagattcattccatgctggtgatcccattgtgggagaaaggggtcgtgaccggaacgctgaaaatttactactgccacgcgcatcagatcacctcgtcattacaggaaatggcggtcggtctgtcgcaaatcatctccacgcaactggaggtttcacgcgccgagcagctacgtgaaatggcaaataaggcagagcttcgcgccctgcaaagcaaaattaatccccattttctgtttaacgctctgaacgctatttcatcgtcaatccgtctgaatccggataccgctcgccagttgatctttaatctgtcgcgttatctgcgctataacattgaattaaaagacgatgagcaaatcgatatcaaaaaagagctgtatcaaattaaagactatattgccattgagcaggcccgctttggtgacaagctgacggttatctatgatattgatgaagaggtgaattgctgcattcccagcctgctgatccagccgttggtggagaacgccattgtccacggtattcagccttgcaaaggtaaaggcgttgtcaccatcagcgttgcagagtgcggaaatcgggtacgcattgcggtgcgagataccgggcacggcatcgatccaaaggtgattgagcgggtcgaagcgaatgaaatgccgggcaataaaattggcctgctgaatgtccatcatcgcgtgaagttattgtatggcgaggggctgcatatccgccgcctggagccggggacggaaattgcgttttacattcctaaccaacgcaccccagtcgcctcacaggctacgttattgctttgagccggagtgatattgtgaaagtcatcattgttgaagacgaattcctggcacaacaggaactgagctggctaattaaagagcacagccagatggagattgtcggcacctttgacgacggtctggacgtgttgaagtttttgcagcataaccgcgtcgacgccatttttctggatatcaatattccgtcgctggatggcgtgttgctggcgcaaaacatcagccagttcgcccataaaccgtttattgtgttcatcaccgcgtggaaagaacatgcggtagaagcgtttgaactggaggcgtttgactacattctcaaaccgtatcaggagtcacgtattaccgggatgctgcaaaaactggaagcggcctggcaacaacagcagaccagcagtacgcctgccgcgacggtaacgcgtgagaatgacaccattaatctggtgaaagatgagcgaataatcgtcacgccaattaacgatatctattacgccgaagcgcacgagaaaatgacctttgtctatacgcggcgtgaatcctacgtaatgccgatgaacattaccgaattttgcagcaaactgccgccgtcgcattttttccgctgccatcgctcattttgtgtcaatctgaacaaaatacgcgaaatcgaaccgtggtttaataacacctacattctgcgactgaaagatctggattttgaagtgccggtcagccgcagcaaagtgaaagaatttcgccagttaatgcatctttaatcgggaactttcatgaaagcaccaggcttgcccgccgatcaacaatttttcgccgatctgttcagcggcctggtgcttaacccgcaactactggggcgcgtctggtttgccagccagcctgcctcgttgccggtgggcagtttatgtattgattttccccgtctggatatcgtgctgcgcggcgaatacggcaatctgctggaagcaaagcagcaacgtttggtggaaggagaaatgctgtttattccggcgcgcgcggctaatttaccggtcaacaacaaaccggtgatgctgttaagcctggtgttcgctccgacctggcttgggttatcgttttacgatagccgcaccacgtcgttgttgcatcctgctcgccagatccagcttcccagcctgcaacgcggtgaaggtgaagcgatgcttaccgccctcacccatcttagccgttcgccgctggagcaaaatatcattcagccgctggtgttaagtttgctgcatctttgccgtagcgtggtgaatatgccgccgggcaattcgcagccgcgcggcgattttctctatcacagcatttgtaactgggttcaggataattatgcccagccgctcacccgcgagagcgtggcgcagttttttaatatcacgcccaatcatctgtcaaaactgtttgctcagcatggaacgatgcgttttatcgagtatgtgcgttgggtgcgaatggcgaaggcgaggatgattttgcagaaatatcatctgtcaattcatgaagtggcacagcgttgcggttttccggatagcgactatttttgtcgcgttttccggcgtcagtttggtctgacgccgggagagtacagcgcccgttttcagggctaacgtcagaaggttaattctgtttccagcagcgtcaggatactttgtgcatcttgcgcggcaaacaacgactggcggaagtttttattcaccagtttacgcgccagctgcgagaagactttcacatgattcatcccttcgttagcacccagcgtcagcatgatcaccagttcgacttcgcccatttctgactgccagccaatcggtttcgccagccgggcaatgctgatactggaatgacggatccactgagatttggtgtgcgggatcgctacgccaaaaccaacgccggtggtaacaatctcttcccgctgccagacatcttcttccagctcaaacggatgttcagtgcgcccgttaacgccgaggttgccgcacaggaactggatcgcctgctctttattgctaaaatcctgatcaacaaagatattctccagcgccagcagtgggcgaacgtcttcttccggcgtaaaggcggtgagtaacgcttcaatttcctgcgcactgcggcattcacatgcctgacgcgccagttcccgacacgcctcgctatccagttgacgaagctggcttttcaccgccggaatacgcgggctactcatactcagctcatccaggcccagcccaagcagtagcggcagataacggctttcaccgcccagttcaccgcaaatgcctacccatttgccccgctgatgcgcagtggtaactatttgctgcaacatgcgcaggaacgatggcgtaatcgggttatatagcggcgatacgcgcgggttattacgatcgaccgcatacagatactgggtcatatcgttggagccgatactgaagaaatcgacctcatcgcagaagtggtcgatgatgtagcacaccgacggaacttccaccatgatcccaagcgtaatcgtctctgcatgacgcaggccatcgcgcttaagctcaacgatcgctttttggatctcgcctttcacccataagatctgatcgaggctgtgaaccatcgggatcatcaactgggcgttgccgaaactggcggcgcgcaaaatggcccgcagttgagtgcggaacaggccagcaaattccgggtaaatacgtaccgcgcgatagccgaggaacgggttctcttcctggggaatattcagataaggaatgcttttatcgccgccgatgtccatcgtgcggaagataatcggcttgtcgcccgccgccagtagcacctgctggtaggcttcaaattgctcctgctcgtccggcgcgctgtcgcgatccatatagagcatttcggtacggaacagcccgacaccttccgcgccgttggcaaacgcgcctggcgcttccagagcggtgccgatattcgccgcaatatcaatacgcttgttatcacgggaataggccagctgcgcggcagcctgcgcctgttgtttttggcgtttatccgccagcgtctgcgcgacctgataataaccgctcaccgcgtcattcgggttaatcgccagcacgccgcactgggcgtcaagcactgcaggttgcccggcataacgggcaatcgcatccagcggcaagccactcagtaccgggatcgccgaggcacgggccagaatcagtgtatgcgaggtgcgcccggttttctccagaatcatgcccgcaagatttttcaaatcaaggctcaaaaactggcttggggttaaatcttcagccaccagaatggtcggtttttcaagcaccagcttgttgcgcggcttcagttccggccaggtgatatgcagcaactgttcgctgatatcgcgaatgtcgctaacacgttcgcgcagataatcgctggcagaggcagaaagtttggcgcaaacctgctccatattgctgatgatcgccgcccccagcccctgatgctgttctgtcatcaggcgacggatattgcctgcaaattcatcatcctgaatcagcgacaaatgggcgctgaggatagttttgctttcgccgtcacgctcacgcaattgctggttcagttgctcggcaagcgttgccaggctgtgctccagccgggtggaatcttgcgcactggcggggattgcccgataactgtcgaggctgtcgctttgtaacagggtcagcgtacccacgccgacgccgcttgccagcacattgccgtacagtaaatccgggttaaggcggcttaatgaacgcggcagcggatgcgccgtcagttctgcctgcgtaggctgaacgctgtcgctgtcgataaagcgcacctggatgtactcttccagcacgcgccgcgcctgctcttcatcgctgccgctaatgttcaggctgcaactgtcattaaatagggtgccggtgccaatcagcgccagcgagcttttcgcatctgcctttgcgttctggcgatggttaataaaagtgatttcgctttgccactggctgcactgttctttaagttcccacgccggacgagcatgtagaccgttaggcaaaggacagagaaattgaatcgttaacataaccgctccgggttaatcaggagatcatctgaaatccgtcagttgaacaaccgtctcacgcgtaagacgttgaataagggcagataaaagttgctgcatctgcaaaatgtcgcggcaatcggcaatcgatgcggcgcaatgtccatggcgggttgctggccccatcaccactgtgggcacgccggtgccggttaagtgcaccgccccgccgtccgtgccgccgttgctgaacatatctgcctgcaacggcacgccaatttctgccgccacggtttcgacccaggcggtaagttttggcggcgcaatcagcgacttgtcgcttaacaccagcatcggcccgttaccaatctggcgatggttagccgcgccataatcaaagtttttcgcccagcaggcggtatcaagcacaatggcgacgtccggcgacaccgcgcgggtggcagtttgcccgccgcgtaatcccacctcttcgctggaacttgccaccagccacacttccgcaggtagttcggcgtcgtgcagttcgcgcagtaacgtcaccagcagatagcaaccgaggcggtcatcaaaggctttccccatcactcgctggtgagggagaacctgaaaagtggtatcaaacgtgacgcgatcgccgggacgaattcccgcctgcatcacttcgtcataggagcgcgcaccaatgtccacgcgcatggcgctgacgtcattcccctgccggtcgccgtcaagcaggcctggaattttgcactcttcacgggtggtgatgcgcaccggctgcagctggcgggcagccatgcgtacgttgccaaccggcagcacatcaatcgccccttcgcgggagatgctgcgcaccataaatcccacttcgtccatatgcgcacagatcatcaccttcggacctgtcgattcattcaggcggatcagcaccgatcccagaccatcaaatcgcacttctttttgcaggcgatccgcttcttccagcaggatctgccgcacttcctgttccgaggaggcgatcgcatctgcctcgctcaacgcttttaatagcgataaatccattatgcctctcccgtgagcaacactgttttcggcatggcgtagagcacttctgcgccttgcggggtaaccagcacaacatcttcgatgcgcacgcccccttgccctggcaaataaatccccggctccacggtcagtaacatgcctggctgtagcgtcgtggtgtcccgcggtgaaaaacgcggatcttcatgaacttcaatgccgatagcgtgaccggtgttatgaccgaaatagtcgccataacctgcttctgtaatgacccggcgcgcggcatcgtcaacctgctggcagcgcacgccggggcgaatcgcggagattgctgcgagctgtgcctgcaggacaatttgatagacgttaaacagcaggtgagattcggcgctcaccccttcgccattcaccagcaaggtgcgcgtcatatcagagcagtagccctgatacagcgcaccgaaatcgagagtgacaaactcgcccgctgcaacaatcttgtcgctggctttgccgtgcggcagcgccccacgccagccactggcgacaatggtgtcaaaagaggctttttctgcgccctgctggcgcataaaccactccagttcagcggctatctcgcgctcgctcatccccgcctgaataaagcggcgaatatgctctgcaccgcgatcagcaatcccacaggcgaggcggattttctccacctcctctggcgttttgatttgccgcagcacatccggcgtggcgctaaccagtttcgcattgagttcagactgccagcggtgcgcggtttcccaactcacctgctggccctcaaaaccgagcgtttgcaactgttcatcggcaatgatttgattgacgatagtggtaagcgtgttcgtcgcgtcaagcaaatgcagctggtagccttgcgcacgggcttccacctcaacgtaatagcgcgaatccaccagaatgtgcgcactttcacggctaatcaccacataacctgatccggtggagatccccagatgcggctgtttgttctgccgtgaggagagaagcactgcatccagttgttgcgccttaagccagtcgcgcagcgaagcgagtaatgtcatctggattttccttcttacaggctatcgattaacaatttgcctttacggaacatcatcagacgcaggaacaccaccatcagcgcagttatgactgcccccagcgcgatccccgccatatagacgcccaggttagtgaccagcggccatgcccagatagcggactccgggaaccattgcactgcgcccagccagacagcggcggttgagccgacaatagcgccgaccatatacgacggaatggcggtgatggggctttccagcgcaaacggaatcgcaccctcactgatccccataaacgccaggaacatggcggtcttaccctgcggataaagttgagcgttgaacaggcgtttgccggttaaacgacggtcgataatggtcgccagccccagaccaatcggcggaataacgatagcgatagaacgagcggtgaccggtaatacgtggtcagtggtaaagctgaaggcaacaaaacctgcggctttgttgatcgggccaccaaggtcgattgctgtcgccgcggcgatccccattgcgtacatcagcgcgcccttctcacctgcggcagtcagcacagtacggataccgccgttgatccagccaccaaagggggtgatgacgtagtacatcgccagcatgacaaaaatggcggaaagaatcgggagcaaaaatgtggttttgaacgctaacaggaaatccggtaactggattttctggttcatccacttcacaaggtaaccggcaacgatagaaataatcagcgcaccaatgaaggtggacggcaccggcgaagaggtcgcccattgcatagtgctgggatcgaagttcagcagttgcgtcggctgggtagacatcaacccgccgataaaaccagccgggaacgccagtttgccaccgatagagttcgccacaaaagcagcaaacatcggaatggcaaaaccaaacaacacgccgccgaaggactgcgacagccaggcaaatttaagtaaggagaggtcgaaaccggagaatttcccgctattaagagcatccatgatgccgatctcagcaggaattttaagccagctataagcaatcagctggctgaaagcgaggatcacaccgcccataattaaggtcggcaccatgcgtgaaatccctgacatcacatgctgcgggagttcaccccagaagctggttttagaggcctgcggattcttaactgccgctgccgcaccggatgcgccaggcacaacggttgcactgcgttttttaatggccataacaattatccctgtcgaatattactgttgttcagaggcaatcatctcttcgatttctttgatgatgcccgcagcgtttttaattgcgtcctgcaaagtgatttcataaacgtcgcgtgattcgaaacgttcgttatcttccggggtaactgccacggagtggatgatgatggtcgcttcggcgatatcctgcgccgtcaggcgattctggataccgtccgcgccctgggtttcaattttcacttcataaccggcttctaccgccgcttcttccagcgcctgagcggccataaaggtgtgagccaggcccatcgggcaggcacataaggcaatcagtttcttactcatcgttaattcctcgttcagtgatagttgacgagtgaaattatgaacgtgcaaaacaaatcgccgttaccagacaaataatgcatttactggagaattaatcccgctgtacggaagtgtgacgcaggtcgaccttgtgaggggacacaaagaaaaattgaataaactgtatgatttaaaagattatcgggagagttacctcccgatataaaaggaaggatttacagaatgtgacctaaggtctggcgtaaatgtgcaccggaaccgagaaggcccggattgtcatggacgatgagatacaccggaatatcatggacatattctttaaagcgccctttatcttcaaatgcggcacggaaaccggaggctttgaagaactcaaggaagcgcggcacgataccgcccgcaataaacacgccgccaaatgtcccgagattgagcgccagattgccgccaaaacggcccataatgacgcaaaacagcgacaatgcgcggcggcaatcggtgcagctgtcagccagcgcgcgttcggtaatatcttttggcttgagattttctggcaggcggttgtcagctttcacaattgcgcgatacaaattcaccagcccagggccagaaagcacgcgctccgccgaaacatgaccaatttccgcacgcaatatttcgaggataatggcctcttcttcactattcggcgcaaaatcaacgtgaccgccttcgcctggcaagcttacccaacgcttatcgacatggaccagatgcgcaaccccaagccccgttccggcaccgtaaaccgcaataggcttaccttcgaccggttctgcgccaccaaactgaatcagatgctcttttttcagcatcgggatcgccatcgatacagcggtaaaatcgttaataatttccagatggctaaaaccgagattctttttcatttcggcaattgagaacgcccaggtatggttggtcatcgccacccagtcaccggtaattgggcaagcgatggcaatacagccgtctttcacctcgaccttatgttcttcaagataaacgcgaatgaccgcttcgaggctggggtaatcaagccctgaataggtcttagcctgcgagatttcaccactggcaatatcacacagagcaagacgtgcgttggtgccgcccacatcaccgactaatgcatactttgtcattcttcaactgctccgctaaagtcaaaataattctttctcacactgtaaatacctgggggcataacaacaacgccggaaaggcaggctccctgtaaatatcgatctgggtcacacaattactttatcgtttcagcaccaattgcagcgatgcctttttgcaagctgggcaaactaagtatctgaccccgcataaggaatagaacatgctccatccgcgagccagaaccatgttgttattatcgctccccgccgtggcaattgggattgcgtccagtcttattctgattgtggtgatgaaaatcgcctcggtattacagaatttgctctggcaacgactgccgggaactctggggatagcccaggattcacccctctggatcatcggtgtattaacgctaacgggtattgcggtggggttggttatccgtttcagccagggtcatgccggaccagaccccgcctgtgaaccgctgatcggcgcaccggttccgccctctgcgctacctggacttatcgtagcattaattctcggtcttgctggcggcgtcagcctggggccggaacatccgatcatgaccgtcaatatcgcccttgcggttgccattggcgctcgtctgttaccgcgcgtcaaccgaatggagtggactattttagcctctgccggaaccatcggcgcactgtttggcactcctgttgcggcggcgttgatattttcgcaaaccttaaatggcagtagtgaagttccgctatgggatcgtctctttgcgccgttaatggcggcagcagctggtgcacttactaccggattatttttccatcctcatttttcactgcccattgctcattacggacagatggaaatgaccgatattctcagcggtgcaattgtcgcggcgattgccatcgcagcagggatggtcgccgtatggtgcttaccacggttgcacgcgatgatgcatcaaatgaaaaatccggtgctcgtgctgggtattggcggatttattctcggtattctgggggttattggtggaccagtttcgctgtttaaagggctggatgagatgcagcagatggtggcaaatcaggctttcagcaccagcgattactttttgctggcggtaattaaacttgccgccctggtcgttgctgccgccagtggctttcgcggtgggcgaatcttcccggcagtgtttgtcggcgtggcattagggttgatgctgcatgagcacgttcccgccgtaccagcggcaataaccgtttcttgcgctattctcggcatcgtgctggtggtaacacgcgatggctggttaagtctttttatggcggcagtcgttgtacccaataccacattgctaccgctgctctgtatcgtcatgcttccggcatggctgttattagcaggtaagccgatgatgatggtcaatcgtccgaagcaacagccaccccacgataacgtttagcaaaaaatgctctcctttatgatttaagagttatggcgatgatacggggctttacctccccgtaatattgcgttaacaggccgctgacggcttcgagcgtgaaggagaataacaatgttcaggtcactgtttctggcggccgccctgatggcatttaccccgcttgcagcaaacgcaggtgaaatcaccctactgccatcaatcaaattacaaattggcgatcgcgatcattacggtaattactgggacggtggtcactggcgcgaccgtgactactggcatcgcaattatgagtggcgcaaaaaccgttggtggcgtcatgataatggctaccaccgtggctgggataagcgtaaagcgtatgagcgtggctatcgtgaaggctggcgcgatcgtgacgatcatcgcggaaaaggccggggtcatgggcaccgccattaaacgcgtccgccaatggagcacaatgcctgatgcgacgctagtgcgtcttatcaggcctacaaaccggctctttaacgcgtagggcggataaggcgtttacgccgcatccgccaatagtgccagatgcgacgctcattcaactacaatcccagcgccgtccccaccaacaaccagatattcagcgccacgaccagcaccacaatcacccagcctgtctgttttacgcgtttgctgttcaccagatcgcccatcaacttgctgtcactggtgaaaatcagcagtggaaccagcgccagagcgataccaaaacttaacagtacctgactcataaccagaatccgtgtcggatctaatcccatcagaatgacaataaatgacggcaacatggtgactgtacgacgcacccacagcgggatatgaaagcgaatgaagccctgcatcaccacctgccccgccagtgtccccaccaccgttgaagacagccccgcagcaaccaggcttaatccaaagaccgttgccgcagcgtggcttaacagcggttgcagcgtcagataagcctcatcaagatcggcaacaccagtatgaccggaaaagtggaacgccgccgcagctgtagccatcatcgccagattgacaaaaccggcaatagtcatggcgatagccacatcccatttggtggcggaataacgttgttgacgcgaaccgccatgtaaatgctgagtgagcgaggagtgcaaataaatcacatgcggcataatcgtcgcccctaacacgcctgctgccaggaagaccgcttccgaagtaggtaaactcgggatcaccattcctttacccagctgcgccaggttaggctgggagaaaatcaactcgacaatgtaagccgcggcaacaaacaacagtaacccgccaatcactttctccagcggtttttgcccgcgacgttgcagcattaaaatcaggaaagtcgcgatccccgtcagcaccgcgccctgcaacaacgaaacaccaagaatgagtttaaaaccgatcgccgcaccaataaattccgccaggtcggttgccatcgcaataatttctgcctgaacccaatagaaccacactacgggacgcggatagtgatcgcgaatctgctccgccagatttttaccggtggcaatccctagtttggcagagaggatctgaatcagcatcgccatcaggttggcccaaacgacaacccacagtagctgatagccgaagctagcacccgcctgaatattggtcgcaaagttaccgggatcgatataaccaatcgccgcaatgaacgcaggtcccattaatgcgagcctcatcttgcgcgccgcccgtccgctgctactctcaacgcgatagttcgtcatcttgtgcctctaaaacatagcctttgctatgtttcatgctatgccaaacgagaatgattatcaaattcatttaaatggattgtggtgatttctctgatagaccaggattatgactacgaaaagattgatgacttgaatgttatggttatgtttaatgttagcacatttacataactttcagcttccatacacaacatagcagaaatgtatgacagatcactatttttgaagcctgtcacaggacgtcattatagtgtgtgtcagatctcgttttccttaaccatgttacatagaatgtgcacggaaatttaacctgcctcatatttggagcaaatatggaccgcgtccttcattttgtactggcacttgccgttgttgcgattctcgcactgctggtaagcagcgaccgcaaaaaaattcgtatccgttatgttattcaactgcttgttatcgaagtgttactggcgtggttcttcctgaactccgacgttggtttaggcttcgtgaaaggcttctccgaaatgttcgaaaaactgctcggatttgccaacgaagggactaacttcgtctttggtagcatgaatgatcaaggcctggcattcttcttcctgaaagtgctgtgcccaatcgtctttatctctgcactgatcggtattctccagcacattcgcgtgttgccggtgatcatccgcgcaattggtttcctgctctccaaagtcaacggcatgggcaaactggaatcctttaacgccgtcagctccctgattctgggtcagtctgaaaactttattgcctataaagatatcctcggcaaaatctcccgtaatcgtatgtacaccatggctgccacggcaatgtccaccgtgtcgatgtccatcgttggtgcatacatgaccatgctggaaccgaaatacgtcgttgctgcgctggtactgaacatgttcagcacctttatcgtgctgtcgctgatcaatccttaccgtgttgatgccagtgaagaaaacatccagatgtccaacctgcacgaaggtcagagcttcttcgaaatgctgggtgaatacattctggcaggtttcaaagttgccattatcgttgccgcgatgctgattggctttatcgccctgatcgccgcgctgaacgcactgtttgccaccgttactggctggtttggctacagcatctccttccagggcatcctgggctacatcttctatccgattgcatgggtgatgggtgttccttccagtgaagcactgcaagtgggcagtatcatggcgaccaaactggtttccaacgagttcgttgcgatgatggatctgcagaaaattgcttccacgctctctccgcgtgctgaaggcatcatctctgtgttcctggtttccttcgctaacttctcttcaatcgggattatcgcaggtgcagttaaaggcctgaatgaagagcaaggtaacgtggtttctcgcttcggtctgaagctggtttacggctctaccctggtgagtgtgctgtctgcgtcaatcgcagcactggtgctgtaagaccatacataaaaaagccggggataattcccataagcgctaacttaagggttgtggtattacgcctgatatgatttaacgtgccgatgaattactctcacgataactggtcagcaattctggcccatattggtaagcccgaagaactggatacttcggcacgtaatgccggggctctaacccgccgccgcgaaattcgtgatgctgcaactctgctacgtctggggctggcttacggccccggggggatgtcattacgtgaagtcactgcatgggctcagctccatgacgttgcaacattatctgacgtggctctcctgaagcggctgcggaatgccgccgactggtttggcatacttgccgcacaaacacttgctgtacgcgccgcagttacgggttgtacaagcggaaagagattgcgtcttgtcgatggaacagcaatcagtgcgcccgggggcggcagcgctgaatggcgactacatatgggatatgatcctcatacctgtcagttcactgattttgagctaaccgacagcagagacgctgaacggctggaccgatttgcgcaaacggcagacgagatacgcattgctgaccggggattcggttcgcgtcccgaatgtatccgctcacttgcttttggagaagctgattatatcgtccgggttcactggcgaggattgcgctggttaactgcagaaggaatgcgctttgacatgatgggttttctgcgcgggctggattgcggtaagaacggtgaaaccactgtaatgataggcaattcaggtaataaaaaagccggagctccctttccggcacgtctcattgccgtatcacttcctcccgaaaaagcattaatcagtaaaacccgactgctcagcgagaatcgtcgaaaaggacgagtagttcaggcggaaacgctggaagcagcgggccatgtgctattgctaacatcattaccggaagatgaatattcagcagagcaagtggctgattgttaccgtctgcgatggcaaattgaactggcttttaagcggctcaaaagtttgctgcacctggatgctttgcgtgcaaaggaacctgaactcgcgaaagcgtggatatttgctaatctactcgccgcatttttaattgacgacataatccagccatcgctggatttcccccccagaagtgccggatccgaaaagaagaactaactcgttgtggagaataacaaaaatggtcatctggagcttacaggtggccattcgtgggacagtatccctgacagcctacaaaacgcaattgaagaacgcgaggcatcgtcttaacgaggcaccgaggcgtcgcattcttcagatggttcaacccttaagttagcgcttatgggataattccccggtttttttacgcctgttaatcagctaatggctgcgggcgaccaatcaaatacccttgcagatattgcaccccgagcttatgcaatagcgcctgctgctgttgcgtctcgacaaactccgcgaccacactcaatgacttcgctttcgccagatcggtaattgatctcacaatcatcgcatccagcgtgttcgtgacaatatctttcacaaagacgccatcaattttgatgatatcagcctgcaaacgctttaaccgttcgtagttggcatatccggtgccaaagtcatcaatcgcaatccggaaaccaaacttatgcagctgctcgatgttgtacatgctgctttctgcgttagaaaacgcctgctcctcggtgatctcaagaatgaccgcctgcggggagatgtgataacgcttaaacagacgaataatccgcccggcaatattcttttgcagcagcgtgagcggcattaaattgactgaaaagcgcggtccttttttgtcgcaagggtgtgttgccagccacttcaacaaggattccagcacttgcaaatcaaaacgcgcgctaaggttaaactgagcaataaggggcagaaacttatccggggtcataatgccgccgtcatatttcagtcgcgcgaggatctcatcataaccttcaccctctttgttgcgaattggctgggcgtagagcagcaaatcaccctgatctaacgccgtgcgaatggtattcagcaatagcacctgtttagtggtctgcccggaaaccatctcctctctgctatccagcgccagcacatgatgatgtgcgcaggattgctccgccagccagcttaactgccccaacaagggttgcagggtttcctgatttccatcaaaacgcccccaggcagcaccatagcccatatccagcccggtattgttccagtgaatttgccgactattcaggatgttaaccatatgctggagtcgcccttccgtttccggcccgctcagcactaacagcagttcactacccggcaattgatacaacttttcgttttcctgcatcaacggcagcagcgtacggcaaattgagcggatacagtgaacgcgcatcattaagccgtaatgacgactcataaactcaagattatcaatgcgcaggcagcaaaaactcttgcccgcctcttgctccggcgcttgttccaacgcacgaaagttgggtaggagcgttaacggatctgtcagcgcctgcaaatgccagcggcgattaagccattcactgcgatgataaatgcgcaccatatagagcaggcaaacgctaaaggaaatcagcaccgcaagaataaatgccagcgaatattcggtttccaccccttgcaaaaagttctggttgtaattcagaaggcaaagcgttgaaacagcccaggtgagatttaaaaacggatagcgaagcttaccgaccccgagggtaaagatgatgaagaaaacgggtaccaggtaaccggcaataaagtcgttttcataaggtgtgcacaacagaagtagcagcacgcttaacgctgccagccagcttaaggtaaatgcgcgtttctctttgcccaacgacggagcgatatccctgcgccacaatatctgcgcaaagtggggacttacaatcatgcgagtgagatagtagaaaagcatgttgtaaatcagcacagcggtgaaaaggcttagcaaatcaacgaccgtgaaaatggcatccgcatcgccgaaaaaggtggatatctttagcgggaaatcaaagaagctccccacaagatacatgctgcatttgatgccgatcggcgtcaccaaaccaagccagaacagacgttgccagacatatcggctggtcaatccataacgccaacgcgtccccagctgccagcgtaatattgcgcaggcacacaacacgacaaacgtctggctaccgagcatgaccgcagtctgtaaaaaagagagatgaaagttccacagattggtgcaaaacatcccgcataaaacgggaacgacaccgcgccagccaaagataaacaagattgacagcattacgcacagtggcatccacgccagaaagatataactggaatggataatggcaagtggcgaaataaaacgggatagctgaataagtaccacggtgagcgtaaacgctagtgtgaatatcttgatattttttatcaggttatgctccacaaacatgagtacactactctcactgatcggggttttcaggcacacaaataataagtttattcgcatcgcgaagcaaacagggggccagcctgttgccgatttttcatccaatgatgctttcaccaggcggcactaacccggacgtagactgtattacaaaagcggcaaaaagcagagacaaaaaacccccgctttgcagcgagggttggaaatttggtggagctaagcgggatcgaaccgctgacctcttgcatgccatgcaagcgctctcccagctgagctatagccccacgatgcgtttacgtaccaagtttgctgggtgcaaaatttggtggagctaagcgggatcgaaccgctgacctcttgcatgccatgcaagcgctctcccagctgagctatagccccgtcacgtaaagcttgtcgagttgacgggcggcatcatatgaattccgcccgaatgtgtcaacggcaaattgcaacgtgtagtttcaatcgctgaaaaatcaggcaaatgaacaattttggaaaaccgctcgcattcagtagttattcatgtcacggtttcctgtaaagtggtgttataaaatgaactactaatagacccacatacattcagggaattgttatgttcaaggagaggatgacaccagatgaacttgccagactgaccggctatagccgccagaccattaataaatgggtacgcaaggaaggctggacaacgtcaccaaaacctggcgtccagggtggcaaagcccgactggttcacgtcaatgaacaggttcgtgaatatattcgcaatgctgaacgtccagaaggtcagggagaagcgcctgccctttctggtgatgcgccgcttgaagtattgctggtgacactggcgaaagagatgacgccagttgaacaaaaacagtttacatccttgcttctgcgggaagggattatcggattgttacaacgcttagggattcgcgatagcaaataatatgaaaagattacgcaataaaatgaccaccgaagaactggctgaatgcctcggtgtggctaaacaaactgttaaccgttggatcagagaaaaaggctggaaaacggaaaaatttcccggcgtgaaaggcggtcgtgccagacttattctggtcgatacgcaagtttgcgagtttattcagaacacgccagccttccataacacaccaatgttgatggaagctgaagagagaattgctgaatacgctcctggagcacgcgccccggcgtatcgacaaatcatcaacgcgatagataatatgacagacattgagcaggaaaaagtcgcgcaatttttgtcacgtgaaggaattcgcaatttcctcgcccgtctcgatattgacgaatcagcataaataaaaaacggcaggatattatctcctgccgtttatctttttacacgctaattactgctgattttcgcgttcagcaataaaatccagcgctttgttgatacgctcgatactgcgggtcttaccaattgcgtgaacggtaacatccagtgctggagactgccccgcaccggttacggcgacacgcagcggcataccaactttacccatacccacttccagctcatccgccgtcgcctgaatagcgtgatgaacgttttcagcggtccagtcagtaatcgcggccagtttgtcacgaaccacttccagcggctgacgcgctaccggacgcagatgttttttcgcggcgtcggcatcgaactcagcaaaatcttcgtagaaataacggcagctctgtgccatctctttcagcgtcttgcagcgttcgcccagcagtttcaccagatcagccagctgcgggccgttacgggtatcgatattttcctgctcaatgtgccactgtaagtgagtagcaacatactccggcggcagcgcgttaatgtagtgatggttcagccacagcagcttgtcggtgttgaacgcactggcagatttgctgacggcattcaaagtgaagtatttgatcatctcttcacgagtgaagatttcctgatcgccgtgggaccagcccagacgcaccagatagttcagcagtgcttctggcaaataaccgtcatcacgatactgcattacgctgactgccccgtgacgtttggacagttttttaccgtcatcgccattgatcatagaaacgtgcgcgtaaaccggcaccggcgctttcagggccttaagaatgttgatctggcgtggcgtgttgttgatatggtcttcgccacggataacgtgggtgatttccatatcccagtcatcgacaaccacacagaagttataggttggggaaccatcggtacggcggataataagatcgtccagttcctggttgctgaactcgatcggaccacggatctgatcgtcaaaaacaacagaaccttcctgcgggttagcaaaacgtacaacacacggttcatcatcagcatgatgctcatggctgtggcggcagcgaccgtcataacgcggcttctcacctttcgccatttgctcttcgcgcagcgcttccaggcgctctttagagcaatagcatttataagcagtgccctcttccagcatctgatcgatcaccgcgttgtagcgatcaaaacgtttggtctggtagtacggaccttcatcccactccaggctcagccagttcatgccatccataatggcttcgatagcttccggcgtggaacgctcaagatcggtgtcttcaatacgcagcacgaactcaccgccgtggttacgtgcaaaaagccaggagtaaagagcagtacgcgcgccgccaacgtgcagatagcctgttgggcttggcgcgaagcgagttttgattttcatgaaatggccttacgtttagaaagatgccgacaaccggcaaatcctggaaaaattaagtgggcgatattctatcactcccgcctgattcctcaatgtagttcgggtttctaccttacgcattattgttttcgttgacaaattgcgcaacacggtctgttttgcgatcatcttgcttaaatttacgacgaacgaacaatttctttagaaaatgcgttgactcattttgaactctccctataatgcgactccacacagcgggggtgattagctcagctgggagagcacctcccttacaaggagggggtcggcggttcgatcccgtcatcacccaccaactactttatgtagtctccgccgtgtagcaagaaattgagaagtgggtgattagctcagctgggagagcacctcccttacaaggagggggtcggcggttcgatcccgtcatcacccaccactttctcgccagctaaatttcttgtaaaaatgtgaagtaccgaagtgggtgattagctcagctgggagagcacctcccttacaaggagggggtcggcggttcgatcccgtcatcacccaccacttcgggtcgttagctcagttggtagagcagttgacttttaatcaattggtcgcaggttcgaatcctgcacgacccaccaatgtaaaaaagcgccctaaaggcgcttttttactatctgcgatactcaaagattcgaacctgcagcaggtttgagttgagcgcagcgaaacaacggagccgctcgcggcgacggcccgaagggcgagcgaagcgagtcatcctgcacgacccaccaatgtaaaaaagcgccctaaaggcgcttttttgctatctgcgatttgcgaaattgcctgatgcgcttcacttagcagactactatttccggcaattcctgtctcctcacctactgtgtcaatgcagccaacagcttaaccatcgcgggcgtcacctgctgtgtttcataaacaatatataaatctgcagggatgcgctgtttgagcggacggaaaatgacacctggccagttcatttgtgcgtagctgtccgctatcaatgtgataccaatgcccatactgaccatagcgagtaccgtttgcggttcattaacttcgcgaataacaaccggtgaaaatcccacctgctggcaaactcgctgcaaaaaatcccagtcagtgtaaacgggcggcattgtaacaaaatactcgtcacgtagcgcttccagcgggacggtggaaaatgatgagagatgatgctcttcaggcatcgccaccagaaacgccgattcatgcaaccgtaagctggtaaaaccagtcggtggttctgtcgccattcgccagatcccggcatcaagttcgcggcgttccagcaaggccatttgcatcgcgggcatcttttcgcgaaaaagaacgtcaacgttaggattttccctgaggaatcgccgcataaccgggcgcatccgtccccacattgccgttcccactacgccgagttcaatccgccctgcttctccccgacctatttgttcaatccgagccaatacattattagcattcaccagcaatcgacgcgattcttccatcaagattttgcccgcgtgtgtcagtacgacgctgcgcgaatggcgaataaaaagctgcgtgccgagttgattttccagctctttaatatgaatgctgagcggaggctgagacatatttaaacgcgctgctgcgcggccaaaatgcaactcttccgctacggcaagaaaataacggagcaacttaagatctgttctgtatacgcgttccataattaagtgctccatataataaatacatcgtattaaattatcatggcataaagtatttcaccaccagatatccgacatacataaacacaatggataatatacccggtaatacatttggtacaggaataggcaagcgcacgattgtaaacaaagcaccaataccaaaaccaacgccggaagaaaataaaatatctttcactaattaacctttatcataaaagcagctctgaagagcagagccgcgaatccttttaatgagtcaccgctcgatgctttatcttttcagggtcatgattatatttaaacccaaagaaaaatatcactgcgagaaaaagagcatatcctgcaaacaccagccagatagtttgccagtcttttacgccatccaccgaaaagtaatctactgccatgccactcagaatcgagccaacccatgcgccgacaccatttaccatggtcataaagagcccctgcgcgctggcacgaatgctggaatcaacttcctgttcgacaaataccgaaccagaaatattgaagaaatcgaatgcacagccataaacaatcatcgacagcagcagcaaaataaatccggttgttgacggatcgccataggcgaagaagccaaagcgcagcgtccaggccaccatactcatcagcatgacggttttaatgccaaatcgctttaaaaagaatgggatagtcagtataaagcccacttctgccatctgtgaaactgacagtaaaatggagggatatttcaccacaaaactgtcagcaaactccgggttacgggcgaaatcatgtaggaacggattaccaaaaacgttggtaatttgcagtaccgcacccagcatcatggcaaagaggaaaaagatggccatgcgtggatttttaaacagcacgaaggcatccagacccagcttgctggcaagcgatgtggtcgcttttttctccgcaaccggaatcttcggcaaagtcagcgcataagccgacagcagcaatgacgcaccggacgcgatatacagctgcagactactcaattccagatgcagcaggcttactgcccacatcgcgacaatgaaccccaccgtaccaaaaacgcgaatgggcgggaaagcggtcaccgggtcaagccctgcctgggcaagacaggaataagagacgctgttcgataacgcaatagtcggcataaacgccatcgcattgactaacatcacccaaaacatcatatccggatcagttacggatgccgcataaaaaagtacgcccgcacacaccaggtgacacagcatgtatgcacgttctgcgcgcagccatttgtctgcgatgatccccattataccaggcataataatcgcggcgatccctttggaactgtaaaccatgccaacattagcgccggtgaaatgaagagtattaatcatgtaagagccgagggtaaccagccagctcccccagataaaatattgcaaaaaggacattacctttaagcgcatcgcgatgctcataatcgtttccttgtcgcatcatttggcctcacccgcgaggccgtttcttattgtttttctcaggcaattttgcgcagaaagccacaaataaggttgatgaagttctgcttagagagctccgcagccgccagcgtttgcgcatgtgacaatttcacatcgcttaaaccttccgccatattggtaatcgcagagaccgcaacgactttaaggtcgcaatggcgagctgaaataacctcaggcaccacagacataccaacaacatccccaccaataatttgcatcatgcgaatttccgccgcagtctcgaaattcggccccggatacgagacgaacacgccctccgtcagagggaaaccctcttctttcgccactttttgtaacagtgcgcggtattccgcatcgtaggcatttgccagtgagaagaagcgctctccaaaacgatcatcgttaagacccaccatcggcgtaccgggcatggtgttgatatgatctttcaatgcgaccaggctgcctgcccccacttccggacgcagcgagcctgccgcattggtgcagaacagtagctcgcagcccagcagcttaaaggtacgaattgcgtcagtcataatggtcattccacgaccttcgtagaaatgtccgcgacctttcatacataccaccggtacgccctggagatggcccagcactaactcccccgcatgaccatgtaccgtacttaccgggaagcccggcagcttttcgtaggaaattgcgacagcgttctcaatctgatcggccagcgcgccgagcccggaacctaaaataaaggccactcgtggcgtgaaatcaggtttataagtcttgataatatctatgcaaaacagcgggttatgagaaaattgaacctgagacatacatatcctttttctgtagggtggaatctaacgcctttttatagcgaggttgtcccggctcttaccaatacacttttctcacgcattcaatagcgattcgatatcgatggatttatatcttttctctattaatccacggtaaaaactgtattggcgatattaattcctttgcattaacaatatgtcgtttttagcaaaccactttattaagcaatctactaataacgatcggcatagggaattatgctatgaaaaaacatcttttaactctgacactttcctctatattagcgatacctgttgtatctcatgcagaatttaaaggcggttttgcagatatcggcgtgcattatctggactggaccagccggactaccgaaaaatcgtcgaccaaatcacacaaagatgattttggttatcttgaatttgaaggtggcgctaactttagttggggagaaatgtacgggttcttcgactgggaaaacttctataacggtcgccataataaaccaggtagcgagcagcgttatacctttaaaaataccaaccgtatttacctgggtgacaccggatttaatctctacttgcatgcgtatggcacctacggttctgcgaatcgcgtgaatttccacgacgatatgttcctgtacggtatcggctacaatttcaccggcagcggttggtggttcaaaccgttctttgctaagcgttatacagatcaaacctattacactggcgacaacggctatgtcgccggctgggttgcaggttacaactttatgctgggcagcgagaaattcactcttaccaactggaacgagtacgagtttgaccgtgacgctacctatgcagcgggtaatggcggtaaagaagggctgaatggcgcagttgcactgtggtggaatgcaacatcacacattactacggggattcagtatcgatatgcggatgacaaactgggcgaagatttttaccaggatgcgataatctactccatcaaatttaacttctgattgattactgccggggctcccggcagtatgaattcactctatatctgatacaacggatccccttcccgcccagccattagcgcattgccctggtctcgtaccacgtcccataaagcttcagcggcggtggaaagtgaacggttcttcctgcgcaccagcatcaactggcgttcaacaaccggcgtaatgcgctttaccaccagtgggctaccttcaggcaatggtagcgccagtgcgggaagaatactgatgccgatgcctgcggctaccatcgggaacagcgtcgccggatgtccaatctcctgcacaatattcgcctgaataccattgcgcgccagcgctgcgtcaatcagcggtcggctgcctgacgcgtaatcctgcaacaccaatttcgctccctgtaatgcctgccagggtacataatcttccacggccaaagcgctatcgcgatggcaaagcagaaagaaaggctcggaaagaatcgcttcacattgcagatcgcccactgggcctggatcgatgacgatgccaaaatcgacatctccctggcgaatactttccattacccactgctgcggacgatcgtgcaggacaaactgaatatctggatagcggcgatggctttcagcaatgcattgcggaataagatgcgcggaaatggtctggctggcagcgacccgaacttttccgctcagttgttgccccatacgcccggtatcgcgcaacgtgctgttcagttcatccagcagtcgctcaagacgcaaagccagctgctgccctgcatctgtaagcaccacttcacgcgtggttctgtccagcaggcgaacaccagtatgattttccagttccttcacactgtgactcactgccgactggctcaggccgatacgctctcctgcacgactaaaacttttctcctgcgctactgtgacgaaaacctttaattgttttaaagaataattcatctgttttcttcatgaatggatgcaataaatcaattttatttctcaaactggaagaagcacaatagaaccatcgatcatctggagtctttatgaaactttttcgtatcctcgatcctttcaccttaaccctgatcacggtggtgttgctggcctctttctttccggccagaggcgatttcgtccccttctttgaaaatctgaccaccgcagctattgccctgctgttctttatgcacggcgcgaagttgtcgcgtgaggcgattattgctggcggtggtcactggcgactgcatttgtgggtaatgtgcagcaccttcgtgctgtttccgattctgggtgtactgtttgcctggtggaaaccggtaaatgtcgacccgatgctctactccggttttctctacttgtgcattctcccggctaccgtgcagtctgcaatcgccttcacgtcaatggcgggcggtaacgtcgcggcagcggtttgttctgcgtcggcatccagcctgctggggattttcctttcaccattgctggttggtctggtgatgaatgttcacggtgcagggggcagccttgagcaggtcggtaaaattatgctgcaactgctgctgccgtttgtgttggggcatctttcccggccgtggattggtgactgggtgtcgcgcaataaaaaatggattgcgaaaactgaccagacgtccattctgttggtggtttatacagcgttcagcgaagccgtcgttaatggtatctggcataaagttggctggggatcattgctgtttatcgtggtggtcagctgcgttcttctggctatcgtgattgtagttaacgtctttatggcacgccgactgagcttcaataaggcagatgaaattactatcgtcttttgtggttcgaaaaagagtctggcaaatggcatcccgatggcaaacattctgttccccacatcggtgatcggtatgatggtgctgcccctgatgattttccatcagatccaattgatggtctgtgcggtgctggcgcgtcgatacaaacgccagaccgaacagttacaggcgcagcaggaaagcagcgccgataaagcttaaagcggacgcttcaggggctggaccagttgcgtcagcccctcggttttaatcagcagcgtgatttgcattagctcaccgagcttccctgccgggaactcatctttgcgggcaaaccacagcagatactcctccggcaggtcgattaagcgacgccctttgtatttgccaaacggcattatcgtattggctatttcaatcagctgctctttttccatctcagctacccagcaaacgcagcatttccgcttcgtcgatgacttcaatgcccagttcctgcgccttcgccagtttagatcctgcagcttcacccgctatcaccagatcggttttcttcgacacgctgcccgcgactttcgcgcccagttcgaccagtcgagctttagcgtcatcacgcgacatctggcttaagctgcccgtaagcaccacggttttaccagcaaacgggctgtcaatctcttccgcgttgataacgatcggcgcaggccagtgaacaccttccgccaacagctcgctgatgacattgcggttgctttcttcggcaaagaagttgtgaacgtgggatgcaacgacaatgccaacatcaggcaccttttgcagctcttcaatcgaagcggcttccagcgcttccagcgtgccgaaatatgccgccagacctgctgcggtggcctcgccgacttcacggatgccaagtgcatagaggaagcgagcaaaggtggtttctttcgctttttccagcgcgttaaccacgttttgtgccgattttggccccatacgctccagtccggtcagtttgcctgcggtgagtttgaacagatctgccggagtatggacatattctttttcaaccagctgatcgatgattttgtcgcccattccgtcaacatccatcgcacggcgggaaacaaagtgtttcagcgactctttacgctgcgcaccgcaaatcaggccaccggtacagcgggcaaccgcttcaccttccacacgctcaacgtcagaaccacataccggacaatgcgtcgggaatacaacctcacgggtatcttccgggcgttcagaaagcacgacgttaaccacctgcgggatcacgtcgccagcgcggcgaatcaccactttatcgccaatgcgtaaaccaagacgttcgatttcatccgcattgtgtaaggttgcgttactcaccagcacgcctgcaacatggacaggttccagacgcgcaacaggcgtaatcgcgccagtacgcccaacctgaaactcgacgtcacgcacaaaggtcatctgctcctgcgccgggaatttaaacgctaccgcccagcgcggggcacgcgcgacaaagccaagctgctcctgctgtgccagtgagttgaccttaatcaccacgccgtcgatatcaaagcccagcgtcgggcggtcttcttccactttgtgatagaacgccagcacttcttccgccgattcacaaagcgttacccgatcgctgaccggcaacccccactttttaaattgcagtaaacggccaagatgagtatccggcagctcgccaccttccagaacaccaacgccatagcagaaaaaagtgagcggtcgcttcgctgtaatacgcggatcaagctgacgcagtgaaccagctgccgcattacgtgggttagcaaacactttcccgcccgtgcgtcgcgcatcttcgttaatcttttcgaaccccgcctgcggcaggaacacttcaccacgcacttccagacgcgccgggatattctctccgtgcagcttcagcggaatggcgcgaatagtacgcacattagacgtgatatcttccccggtggtgccatcgccacgggtcgcggcactgactaaaacgccattttcatacagaatactgacggcaagaccatccagcttcagctcacagcaccaggtgactttctcgttgtttttcagacggtcctgcacacgtttgttgaaagcaagaaagctttcttcatcaaaaacgttatccagtgacagcattggtacttcatggcgtatctggctgaaagccgccagcggcgcagcgcctacacgttgagtaggcgaatcaggcgtaatcagttctggatgtttggtttccagctcgcgcagttcgcgcatcagcctgtcgtattcagcgtcgggaatttccggcgcatccatcacatgataaagatattcatgatggcgaagcgtcgttcgcagttctgtcagttgttgttcgattgattccatatcgcaccatcaatgctaaaaacccccgacaagcgggggttcgaagaggagttaatttgccttaagtgtatcaggcgttggcgtctttgacttcgcggatgatgtcctggtactcgcgcaatttctgcggagtcatcatacggcgctgatcgtcaagcacgacaccgcccacttcatcggcaatatgctgcgcagattgcagcatcagcttgaagttctgcagctcgtcaccgtaagacggtacctgcataaagatagtgacacccggagtagtgaaatccttcatttcaggatcaaaggttcccggtttcaccatattcgccaggctgaataacgccgggccgctgccatccgggctaagatgacgatggtaaatattcatatcgccaaaaatgaagcccgcttgttgaatgctgttaagaagcagttcaccgtttagctcgctaccgtgatgcgccgcgacgttcatgataatcaccgcttctttgcgcttcggtttatccataactggagcaggttccgctacaggctcaggctgtggtgccgctacgggttctgcaggctggaaagcctgttgtgccggttgcggtgctgaatgcacaggctgcggcgctggcgcgacctgtggcgaaactggctgctgcaacggctgttcaggctgcggctgataggcaggctgctgcaccggctgcgctggatgcggagcatgttgcggcggtacctgcgcttcaggcggctgctggaccggttgacgcggctgcgcagacgcataaggcggttggtactggtgttgcggcgacggacgagcagcctcatgctcctgagcgttagccggggcatgattcacgcggtgaacacgaacctcaccaacgccctcatcatcttcgacatcctcgtcataagaatcgtcgtcacgttttgacttcattcgttttaatggccgatcgcggaacatagaagatcgttctttacggctggtccagaaaccatgtaccagtaaagcgattatggcgatcgcgccaacaatgattaatatcagacgcaaatcctgcatcattatattctctgttgttctaacaccttgccaccacggcaaacatttactcactaagagtatttgccgattacctcaagtgcaagtgcactattaactttcacagcacaaagatagatgaaatcgtgctttttgctgttttttcgaacatatcctaactgtccattgcgcaattacccggtaaaatacgcagaattttcctgggattggtcaaaaggagctcatcctgattatggtttcatcattcacatctgccccacgcagcggtttttactattttgcgcaaggctggaagctcgtctcgcaacctgggattcggcgtttcgttattttaccgctgctggtcaatattttgttgatggggggcgcattctggtggctctttacacagctcgatgtctggatcccgactctcatgagttacgttccggactggctacaatggctgagttatctgttgtggcctctggctgtcatctctgtgctgttagtgtttggctatttcttctccacgattgctaactggattgccgctccgtttaacggtttattggctgaacaactggaagcacgattgactggcgctacaccgccagataccgggattttcggtatcatgaaagatgtgccgcgaatcatgaaacgcgaatggcaaaaatttgcctggtatctgccgcgcgcaattgtattactaattctttacttcatccctggtattgggcaaaccgtcgcgccggtactgtggttcctgtttagcgcctggatgttagccatccagtattgcgattaccccttcgataaccacaaagtgccgtttaaagagatgcgcaccgccctgcgcacacgcaaaatcaccaatatgcagtttggtgctttaaccagcctgtttacgatgatcccgctgcttaatctgttcatcatgcccgttgccgtttgtggcgcgacggcgatgtgggtcgattgctatcgcgataaacacgcgatgtggcggtaacaatctaccggttattttgtaaaccgtttgtgtgaaacaggggtggcttatgccgccccttattccatcttgcatgtcattatttcccttctgtatatagatatgctaaatccttacttccgcatattctctgagcgggtatgctacctgttgtatcccaatttcatacagttaaggacaggccatgagtaagatttttgaagataactcgctgactatcggtcacacgccgctggttcgcctgaatcgcatcggtaacggacgcattctggcgaaggtggaatctcgtaaccccagcttcagcgttaagtgccgtatcggtgccaacatgatttgggatgccgaaaagcgcggcgtgctgaaaccaggcgttgaactggttgaaccgaccagcggtaataccgggattgcactggcctatgtagctgccgctcgcggttacaaactcaccctgaccatgccagaaaccatgagtattgaacgccgcaagctgctgaaagcgttaggtgcaaacctggtgctgacggaaggtgctaaaggcatgaaaggcgcaatccaaaaagcagaagaaattgtcgccagcaatccagagaaatacctgctgctgcaacaattcagcaatccggcaaaccctgaaattcacgaaaagaccaccggtccggagatatgggaagataccgacggtcaggttgatgtatttattgctggcgttgggactggcggtacgctgactggcgtcagccgctacattaaaggcaccaaaggcaagaccgatcttatctctgtcgccgttgagccaaccgattctccagttatcgcccaggcgctggcaggtgaagagattaaacctggcccgcataaaattcagggtattggcgctggttttatcccggctaacctcgatctcaagctggtcgataaagtcattggcatcaccaatgaagaagcgatttctaccgcgcgtcgtctgatggaagaagaaggtattcttgcaggtatctcttctggagcagctgttgccgcggcgttgaaactacaagaagatgaaagctttaccaacaagaatattgtggttattctaccatcatcgggtgagcgttatttaagcaccgcattgtttgccgatctcttcactgagaaagaattgcaacagtaatgccagcttgttaaaaatgcgtaaaaaagcacctttttaggtgcttttttgtggcctgcttcaaactttcgcccctcctggcattgattcagcctgtcggaactggtatttaaccagactaattattttgatgcgcgaaattaatcgttacaggaaaagccaaagctgaatcgattttatgatttggttcaattcttcctttagcggcataatgtttaatgacgtacgaaacgtcagcggtcaacacccgccagcaatggactgtattgcgctcttcgtgcgtcgcgtctgttaaaaactggcgctaacaatacaggctaaagtcgaaccgccaggctagactttagttccacaacactaaacctataagttggggaaatacaatgttccagcaagaagttaccattaccgctccgaacggtctgcacacccgccctgctgcccagtttgtaaaagaagctaagggcttcacttctgaaattactgtgacttccaacggcaaaagcgccagcgcgaaaagcctgtttaaactgcagactctgggcctgactcaaggtaccgttgtgactatctccgcagaaggcgaagacgagcagaaagcggttgaacatctggttaaactgatggcggaactcgagtaatttcccgggttcttttaaaaatcagtcacaagtaaggtagggttatgatttcaggcattttagcatccccgggtatcgctttcggtaaagctctgcttctgaaagaagacgaaattgtcattgaccggaaaaaaatttctgccgaccaggttgatcaggaagttgaacgttttctgagcggtcgtgccaaggcatcagcccagctggaaacgatcaaaacgaaagctggtgaaacgttcggtgaagaaaaagaagccatctttgaagggcatattatgctgctcgaagatgaggagctggagcaggaaatcatagccctgattaaagataagcacatgacagctgacgcagctgctcatgaagttatcgaaggtcaggcttctgccctggaagagctggatgatgaatacctgaaagaacgtgcggctgacgtacgtgatatcggtaagcgcctgctgcgcaacatcctgggcctgaagattatcgacctgagcgccattcaggatgaagtcattctggttgccgctgacctgacgccgtccgaaaccgcacagctgaacctgaagaaggtgctgggtttcatcaccgacgcgggtggccgtacttcccacacctctatcatggcgcgttctctggaactacctgctatcgtgggtaccggtagcgtcacctctcaggtgaaaaatgacgactatctgattctggatgccgtaaataatcaggtttacgtcaatccaaccaacgaagttattgataaaatgcgcgctgttcaggagcaagtggcttctgaaaaagcagagcttgctaaactgaaagatctgccagctattacgctggacggtcaccaggtagaagtatgcgctaacattggtacggttcgtgacgttgaaggtgcagagcgtaacggcgctgaaggcgttggtctgtatcgtactgagttcctgttcatggaccgcgacgcactgcccactgaagaagaacagtttgctgcttacaaagcagtggctgaagcgtgtggctcgcaagcggttatcgttcgtaccatggacatcggcggcgacaaagagctgccatacatgaacttcccgaaagaagagaacccgttcctcggctggcgcgctatccgtatcgcgatggatcgtagagagatcctgcgcgatcagctccgcgctatcctgcgtgcctcggctttcggtaaattgcgcattatgttcccgatgatcatctctgttgaagaagtgcgtgcactgcgcaaagagatcgaaatctacaaacaggaactgcgcgacgaaggtaaagcgtttgacgagtcaattgaaatcggcgtaatggtggaaacaccggctgccgcaacaattgcacgtcatttagccaaagaagttgatttctttagtatcggcaccaatgatttaacgcagtacactctggcagttgaccgtggtaatgatatgatttcacacctttaccagccaatgtcaccgtccgtgctgaacttgatcaagcaagttattgatgcttctcatgctgaaggcaaatggactggcatgtgtggtgagcttgctggcgatgaacgtgctacacttctgttgctggggatgggtctggacgaattctctatgagcgccatttctatcccgcgcattaagaagattatccgtaacacgaacttcgaagatgcgaaggtgttagcagagcaggctcttgctcaaccgacaacggacgagttaatgacgctggttaacaagttcattgaagaaaaaacaatctgctaatccacgagatgcggcccaatttactgcttaggagaagatcatgggtttgttcgataaactgaaatctctggtttccgacgacaagaaggataccggaactattgagatcattgctccgctctctggcgagatcgtcaatatcgaagacgtgccggatgtcgtttttgcggaaaaaatcgttggtgatggtattgctatcaaaccaacgggtaacaaaatggtcgcgccagtagacggcaccattggtaaaatctttgaaaccaaccacgcattctctatcgaatctgatagcggcgttgaactgttcgtccacttcggtatcgacaccgttgaactgaaaggcgaaggcttcaagcgtattgctgaagaaggtcagcgcgtgaaagttggcgatactgtcattgaatttgatctgccgctgctggaagagaaagccaagtctaccctgactccggttgttatctccaacatggacgaaatcaaagaactgatcaaactgtccggtagcgtaaccgtgggtgaaaccccggttatccgcatcaagaagtaattcttgccgcagtgaaaaatggcgcccatcggcgccatttttttatgcttccgccagcggcggcaaaatcaattcatcgctctcatgctgctgggtgtagcgcatcacttccagtacgcgcaaccccgctcggtgcactgcatcggttaacgccttccctttcagcaagccactgatgagctgagcacaaaacaggtcgccagtccctttcaggtcggtttttacccgtgaatgggaaatgacattcacgctgtcggcagtgaccaccacaacctgcatctcctgattttcttcattaccggaggcgctggtaaccaccacccattttaatgtgtctgaaagcagactttttgcggcagcaatggcactgtcgagatcgcggcaatttttaccggtcaggatttccaactcaaagatattgggggtaattccctgcgccagcggcagtaaatattgtcgatacgcttcgggaaggtcaggtttgacataaattccgctatcaatatcgccaatcaccggatcgaccatgatcaataggtcaggatggtctttgcgtagcgcagtcagccactcggcaaggattttgatttgcgatgccgttcccatatagcccgtggttacagcacgaagttggcgcagcgcatcacgctcctgaagcgcacgcaaatagccgctaaaccattcgtccggaatcgcaccaccgtagaaagtgtcataatgcggcgtattgctcagcaataccgtcggcacggcaaagacattcaggccgttctgtttgatagcaggcacggcaatgctgttgcccacgctgccgtaaaccacctgcgactgcacggcgacgatatccgcctgcagtgccctactcttatcgttaaacaacaacaaactactcatttaattttttctccttgccgatgatcctcatcgtaatccaaccgaaactttacctgattctggcagtcaaatcggctatcacaaaacaaggataaggtaattcaatgaagaaaatcatttgtctggtcattacactactaatgacactccccgtttacgcgaagttaactgcccatgaagaagcccgcatcaacgccatgctggagggattagcacagaaaaaggatttgatatttgtgcgcaacggtgatgaacatacctgctatgaagcggtttctcatctgcgtctgaagctcggcaatacccgtaaccgcattgacactgccgagcagtttattgataaggttgcttcgtcgtcatcgattactgggaagccgtatattgtgaagatccccggtaagagcgatgagaacgcacagccttttttacatgcgttaattgcgcagacggataaaacggtgcctgcggaaggaaattaatccgctttgggaaggcatttacaggaggtaacatgaaaaaacgctttatttatcacgatgaaaaatcgaataaattttggtggatagattacgaaggggatagtttagctgtcaactatggcaaggtaggtagtattggtaaattccagacaaaagagttcgataatgaagaacagtgtctgaaagaagccagtaaattgattgccgcaaaaatgaagaaaggctatcaagaagatccaaagtttaacttcatggatcgctactattttgatgatgaagaaattgggttacatgttaaaacgtcacacccaaacttccagtgccattttactgatccactttatatgtgttgctgggatgaagaatctccttttggcagcgatgaaggtgctgatgctctaaacgttcttgaaaatagcctccgtaaagagccggatctggactgtgctgatttccctcaaatgttaattgaaactatgtggggtatgaaatacatcgctatggacagtattcttgaagaggatgttcgtgcgcaattactagtcgatgaaatgagcactatccagagcaatatgattacctacgcaactgcattcggtcagattaaagtcatgggtaaaatctcccataaacttaaaaagatgggactcaatgcactagcgcgtcatcagcttaccgcaaaaattcttcaatggggtgacggtcaggactcaccaatacttcaaaaaatgattgatgaccttacggcgtttcctcacgaaaattaaatactgcatttgtcggcagcaacaactgttaaaaaagtgcgctttgtttatgccggatgcggcgtaaacgccttatccggcctacaaaatcgtgctaattcaatatattgcagaaaccttgtaggcctgataagcgtagcgcatcaggcagttttgcgtttgtcatcagtctccgatgctattaatccttaaatccccgccccctggctaaaatgctcttccccaaacaccccggtagaaaggtagcgatcgccacgatcgcagatgatcgccaccaccaccgcgtcagggttagcttttgccacccgcagtgctccggcaaccgcgccgccggagctgacgccacagaatattccttcccgcaccgccagttcgcgcatggtgttttccgcatcgcgctgatgaatatccagcacctcatccaccagagaagcgttgaaaatccccggcagatattccgtaggccagcggcgaatgccgggaatgctgctgccctcttccggttgcaggccgacaatggtcaccggtttggattgttcgcgcataaagcgtgagacgccggtgatagtgccggtcgtccccatgctggagacaaaatgagtgatgcgcccgccggtttgctgccagatttccggcccagtggtggtgtaatgcgcataagggttatcgggattattgaactgatcgagcagctttccttcgccacgattcgccatctccagcgccagatcgcgcgcaccttccatgccctgctctttggtgacaagaatcagttccgcaccataagcacgcatcgccgcacggcgttcctggctcatgttgtcgggcatcagcaatttcatgcgatagcctttcagcgcggcaatcattgccagcgcaatgccggtgttaccactggtggcttcgattaagacatcacccggtttaatttccccgcgcttttccgcctcgacgatcatcgaaagtgccgcacgatctttcaccgaacctgccgggttattgccttccagttttaaccacacttcactgccgttatccggccccattcgctgcaacttcaccagaggcgtattgcctattgtttgttctaatgtactcacgatctctatccatacgtggtgttgcctgatgcgacgcttgcgcgtcttatcaggtctacaggttacaaaccttgccattaaaaagcccggatcgcgggaagcgcctccgggcgtttaacattcactcaacctatcaggcgctttgtgcgagagcaagttcctcatcgcgggtttcgatacgctcgtcgccgttatacagccgcgcatgttgcagaccaacgaataaacgctcgccacgctgcggggcatcgtcgccatgcatcacgaccgtcagcggttcgttgtaccaccccagcggctgcaccactaattgggtgtagtgacctttcgggctggcttccagtacctgtaccggcagcggcgaatcgaggctggtacggcggctgatatccacttcccaagggcgcaggaagagatccaccggcccctgatacgcaggtgtgtagcccagcggccagcgatgcgcgccaacatggaactgcccgccgcgaatggttccctgcaggcggttcacttcgcccataaattcgagcacaaaacgggtcgccggttcgcgccatacctgatccggcgcgtcagcctgttcaatattgccctggctcatcacaactacacgatcagctacttcggtcgcttcttcctgatcgtgggtcacaaaaacgctggtgaattttagttcttcatggagttgacgcagccagcgacgcagctctttacgcacctgcgcatccagcgcgccaaacggttcatcaagcagcagaatttgcggttccacagccagcgcgcgcgccagcgccacgcgctgtttctggccgccggaaagctgcgccggataacgatccgccagatgggcaagctggaccatttccagcaattttgtcactttcgctttgatggctgcggcattcgggcgctcgcgacgcggcagcaccgtcaggccaaaagcgatattgtcgaacaccgtcatatggcggaacagcgcgtaatgctggaacacgaaaccgactttacgatcacgtgcgtgcaggcggctcacgtcggtgccgtggaagcgaatatgcccgctggtttgatgctccagcccggcgataatgcgcagcagcgtggttttcccggaaccggacggccccagcaacgcgaccatctgacctgaaggaatatccagtgagatatcgttcagcacctgggtgcgaccaaacgacttcttaatattggcaatctcaatgctcatgatgttcctcctgctgtgcgcgtttttcctgattctccaggcgccactgcaacatactttttaaaaacagggtgataatcgccatcagcgttaacagcgccgcagcggtaaaggagccgacggtgttgtagtcctgctccagcaattcaatctgtaacggcagcgacagggtttcgccgcgaatcgagccggaaaccaccgacaccgcgccaaactcgccaattgcgcgggcgttggtcaacaccacgccataaagcagcgcccagcggatgttcggtaatgtgacgcgacggaacatctgccagccggacgcgccaagcaaaatcgccgcttcgtcttcctggctgccctggcttaacatcaccggcaccagttcgcgcaccacaaacggacacgtcacgaagatggtgaccagcaccattcccggccaggagaacataatttgcaggttatgctcgtcgagccaaccgccgagcgggccgttagagccgtagaacagcaaatacaccagaccggcaaccaccggcgatacggcaaacggaatgtccagtagcgtcagcagtaactggcgtccagggaagttaaagcgcgtcaccagccaggccagcagaatgccgaacaccaggtttaccggtacggcaatcagcgcgatcatcaccgtcagccagatggcgtgcagcatgtccggatcggccagattctgtaaaaccggcatcagccccttgctgaatgcctgcacgaagatgtaaatcatcggcaccagcaggatgaacgccgaaaccagcatcccgatgccaatcagaaaccatttgccccagttaatcgggcgcgcgtcataacgcttcaattgggtaacttccgccattaatgacctaccacacgccgaccaaagcgactttgcagagtgttaattgagaacagcagcagcagagatgccgcgaggatcaccgaagcaatcgcgctcgctgccgggtaatcaaactcctgtaagcgcacaaaaatcatcagcgacgtcacttccgtcttccacgcgatatttccggcgataaaaatcaccgcgccaaattcaccaagactacgggtaaacgacagcgccacgcccgccaccagcgccggagaaagctccggcagcaccactttgcagaaactctgccagcgcgttgcaccaagcgtttccgccgcttcttcatattccgggcctaactcttccagcaccggctgcacggtacgcaccacaaacggaatgctggtaaaggccatagccaccgcaatccccagccatgtataggtgactttgatatcaaacttcgccagccattcaccgtaaaaaccgtttacggaaaagagcgaggccagcgttaaaccggcgacagccgttggcagcgcaaagggtaaatccatcagcgcatcaagcagcgtgcggcctgggaagcgatagcgggttaggatccacgccatcagcagaccgaaaacgccgttaaaaatcgatgccacaaacgccgacagcagcgttactttgtaggccgcgaccacctgcgggttggtgatcacctcccagtactgcgcccagctcatctgggccagttgcatcaccagcgcggagagcggcagcagcaaaatcaggcacacaaacagcagactggtgccgaggcttaaggtaaagcccggcagcacgcgtctggaggagacagcaaacatcagttacgccccgccgctaacagcttgtctaactcgccgccgctggtgaagtgggttttcatcacttccggccaggagccaaatttgtcttccacgcggaacagctcggtctgcgggaatttgtctttcagtttgtccatcacctccgggttattcacgcggtagtaatagtcggtgatgatggtttgcgcctgcgggctatagagccagttcagataggctttggcggctttttccgtaccgttggcctgcacgtttttatcaacccacgccaccgggaattccgccagaatgttggttttcggaatcaccacttcaaagccctgcgcttcatactgtttacggatgttgttcacttccgattcgaagctaatcagcacatcgcccaggccgcgctcggcaaaagtggtggtcgcgccacgaccgccagtatcgaacacttcaacgtttttcaggaactgggtcataaactgttcggttttgcctttgtcaccaccgtcagctttatccgctgcgccccatgccgccagataggtataacgcgcgttacccgacgttttcgggttcgggaaaatcagcttcacgtcggagcgcaccaggtcgttccaatcgtggatattcttcgggttacccttacgcaccaggaagcccatggtggagtagaacggcgagctattattcggcaggcgcgactgccagtcggccgggatcagcttgcctttatcgtgcaggatttgtacgtcggtcacctggttataagtgacaacgtcggcttttaagccctgtaaaatcgccagcgcctgttttgatgacccggcatgagattgttttatcgtcagtttgtcgccgccgttatcttttgcccattgttgctcaaacggcggattcagggcggcaaacagctcgcgggagacgtcataagaactgttcagcagttccgttgcctgtacatggcccgccagcagcagagaagcgaccagcgcgagtgagttctttttcagtaagttaacggccattgcgcacccttataaatttaatgactttctaatagccatcatatttataacggacgtgaaaggagtaacggttttatataccgtttggtgatttggaagttgaaaagggaataagaacttggttcaacaggcgtaattgttgcagtcagtttggacacgaacagcgcggagaaaccggagcgtacacatagtacgtgaggatttcgagcactgcccggggccaaaatgacaaataaaatagcctggtgaacttagttcaagacgaaatcctccccacaaatgcagggaggaaacagaggtgaatcagataccgacgctaaccgtctccggcagtgtgctgccgccatcaatcacattctgtgtaccggttaaatagctggattcatccgatgcgaggaaggccgccagttcgccgacttccagcggatcggcgaggcgacgcatcgggattgctttcgccatttcagtcagcaccgactctggatcttccgggttcgactggcgggcaatgctttccgccattggtgtgcgcacgtatcccgggcaaatggcgttaacgcgaataccagactgcgcgtactccaccgccagcgattttgtcaggccaacaatcgccgctttcgttaaggcgtacgccgtttcgccaggatcggccaccatatcaccagtgactgaagacatcatcacaatgcgaccatctttgcgggcaatcatctccggcagcaccgccttcgtgacgttccatacgcctttaatattgatgtcaatatggaaatcgcgatcgtcatcgctcatatcgaggaaactgcccagacgacaaacgcctgcgttattcaccaggatatcaatgcgcccttctttttccttcgcgcgtttgatagctgcggctaccgacgccgggtcacgcacatcggcgacaaccgccgtacagcgatgaccacgaccacacagttcgtccgccagcttttcgatctcaggggagatatccagcaagattaggttcgcgccatgacgtgcaaaagttctggcaattccttcgccaattccctgcaatgcgcccgtaatcagtgctgtcttgcccgtgagtttacccattttaatgctctccttgttaatacagagcgttacactccattccctctgaaaatacaggataaacaaaatattgctgcggatcagctcactaattcaggaaaatctcaatccagtcgctgctttatgcatcatttcaggcgttgtgttagctcactgctgcgctgaatcattttcaatgactccacatcattgagttgcacaaggccaacaaacagtaaatcggtaacagaattttgcgccgtgcgggtagacatcgacgagctacgccattcggtttctccggaaacggtatcgagggtgaaatgcgccagccgccgcagcggagagtcagtcagagaagtaatggcaatcaccgttgccccctgctttcgtgccgcttctgcgcacaagacaatctcttttttactgccgctgtaagagatagcgatttgtacatcgccttttttcaacgcctgagaaacggtggcttgtacgtgcgtgtcggcttcgcaggccacgcgatagccaattttcatcagtttgaacgacagatcgcgccccaccagcgccgatccgcccaggcccgttatctggataaacggtgctttactgatgacctcaatgattttttgcagccgcgcgtaatcgagcaacgcgcaggtttgctccagcgccagctctttttcgcgattcagtttgcgcgcgatcacttccagcgaatcatcactggtaatcgaactgtgcaggtgcagtgccgtggcattcgttttctcccggctggcactgtattcgcctattaacgccatacgcaattcagtaaatccttgcgcgccgagtttttgggcaaatttcactatgctcgactggctaatgccgagctgtttcgccatctgccgtgaagaaacggattgcagctcactcacgttggcctgcagaaagtcagcgattttttgctcgttttcggtgaattcactccccgcattgcttattttcgtcaggtacaacatcttccactctcctgggctggcagcataaattccgcttaagttcttatgacgctcttcacactctgcgagtgtagactcaatgattcctttaagcctgtcaattcgggatatatgattccatacatctgcaattatttgatcgtaaatagtaaggtcaccaccgatgcaatttgaaaagatgattactgaaggctcgaacaccgcctcggctgaaattgaccgcgtatcgacgctggaaatgtgccggattatcaacgatgaagataaaaccgtaccgcttgccgttgagcgcgtactgccggatatcgccgcggcgatcgatgttatccacgcccaggtaagcggcggcgggcgtctgatttacctcggtgcgggaacatccggtcgtctggggattctggatgccagcgaatgtccgcccacctacggcgtgaaaccgggtctggtggttggtttgattgctggcggcgaatatgccattcagcacgcggtggaaggcgcggaagatagccgggaaggcggtgttaatgatctgaaaaatattaatttaacggcacaggatgtggtggttggcattgctgccagcggtcgcacgccgtatgtgattgccggactggaatacgcacgccagctcggctgccgcacagtgggaatttcctgtaatccggggagcgccgtttcaaccaccgctgagtttgccattacaccgattgtaggtgccgaagttgttaccggttcttcgcggatgaaagcaggtacagcgcagaaactggtgctcaatatgctttccaccgggctgatgattaaatccggcaaagtgttcggcaacctgatggtcgatgtggtcgccaccaacgaaaaactgcatgtgcgacaggtcaatattgttaaaaacgccaccggatgtagcgcagagcaagcggaagcggcgttaattgcttgcgagcgcaactgtaaaacggccattgtgatggtgctgaaaaatctcgatgccgcagaagctaaaaaacgcctggatcaacacggcggctttattcgtcaggttttagacaaggaataacccatggccaaagagatcagcagtgaacttctgaacaccattcttacccgtgtcggcggaccgggaaatatcgccagttgtggtaactgtatgacgcgcctgcgtctgggtgtacatgacagttcactggttgatcccaatatcaaaacgctggaaggcgtgaagggcgtcattttgaccagcgaccaggtgcaggtcgtttttgggcctggtaaagcgcatcgtgccgcaaaagcgatgagcgagctgctgggagaagcaccggtacaggatgccgcagaaatcgccgcccagaacaaacgtcagttaaaagccaaacaaacctccggcgtgcaacaatttctcgccaaattcgccaccatcttcacgccgctgatccccggttttattgccgccggtctgctgctggggatagcgacgttaattgccacggtgatgcacgttccggcagatgctcagggaacactacccgatgcgctgaattttatgaaggtgttcagcaaaggtttgttcactttcctggtgattctggtgggctataacgccgcccaggcatttggcggcacgggcgtaaatggcgcaattatcgccgcgctctttttgctcggttataaccccgcagcgaccaccggttactacgccggttttcacgatttctttggtctgcccatcgatccgcgcggcaatattatcggcgtgctgattgccgcgtgggcctgcgcccgcattgaaggcatggtgcgccgctttatgccggacgatctcgacatgctgctgacctcgttaatcaccctgctgatcaccgctacgcttgcgtacctgatcattatgccgctgggtggctggttattcgaaggtatgtcatggctgtttatgcacctgaacagtaatccgttcggttgtgcggttttagccgggctgttcctgatcgccgtggtatttggcgtgcatcagggctttattcctgtttacctcgcgttaatggacagccagggattcaacagcttatttcccatcctttcaatggcaggcgcgggccaggtgggcgcggcgctggcactctactggcgggcgcaaccgcacagtgcgctacgcagtcaggtacgcggggcgattattcccggcctgctgggcgttggtgaaccgctgatttacggtgtcaccctgccccgcatgaagccgtttgttaccgcctgtttaggcggcgcggcgggcggtttgtttatcggcctgatagcctggtggggtctgccgatgggcttaaacagcgcctttgggccgtctggtctggtagcgctgccgctgatgacttccgcacaaggcatccttccggccatggcggtttatgctggcgggattctggtggcatgggtttgcgggtttattttcaccacgctctttggctgccgtaacgtcaatctggactgatatcatgaaacggacaatgctctatctttctctgctggctgttagttgtagcgtcagcgccgcaaaataccctgttctgacagaaagctcgccagagaaagcagggtttaacgtcgaacggcttaaccagatggatcgctggattagccagcaagttgatgtcggttatcccagcgtaaacctgctgatcattaaagataatcagattgtgtatcgcaaagcctggggagcggcgaaaaagtacgatggcagcgtgttgatggaacagcctgtcaaagccaccaccgggacgctgtatgacctggcctcaaacaccaaaatgtacgccacgaacttcgccctgcaaaagctgatgagcgaaggcaaactgcatcctgacgatcggattgcgaaatatattccggggtttgccgatagtccaaatgacaccattaaaggcaaaaacaccctgcggatttctgacctgctgcatcacagcggcggtttcccggcagatccgcaatacccgaataaagcggtcgcgggcgcgttatattcccaggataaaggccagacgctggagatgatcaagcgcacgccgctggaatatcagcccggcagcaaacatatctacagcgatgtcgattatatgctgcttggatttatcgtcgagtcggttaccggtcagccgcttgaccgctatgttgaagagtcgatttatcgcccgctcggcctgacacatacggtatttaacccgctgctgaaaggctttaaaccgcaacaaattgccgccacggaattgaacggcaatacccgcgatggcgtgatccatttcccgaatatccgcacctccactctctggggtcaggtgcacgatgaaaaagccttttattcgatgggcggcgtttccgggcacgcaggtttgttttccaataccggcgatattgcggtgttaatgcaaacgatgctgaacggcgggggctatggtgatgtgcagctgttcaatgcggaaacggtgaagatgttcaccaccagctctaaggaagatgccacttttggcctcggctggcgcgtgaatggtaatgccaccatgacgccgacgtttggcacgctggcaagcccgcaaacctacggtcacactggctggaccggaacggtgaccgttatcgatccggtgaatcatatgacgattgtgatgttaagcaacaagccacattcgccggttgccgatccgcaaaagaatcccaatatgttcgaaagcggtcagttgccgattgcaacttatggttgggtagttgatcaggtgtatgcggcgttaaagcagaagtaataaaaaggccagtcagtaatgttactggctggtctgagagtgctgacaaacgcaaaactgcctgatgcgctacgcttatcaggcctacgtggagcccacaatatattgaattagcacgatttcgtaggccggataaggcgttcacgccgcatccggcgtgtacaacgcgcacttggtcaacaatctgaggccagtcagtaatgttactgcctggcctttaatcaatgaatcagaaacgcttacagcgccatcaacttgtccagcgacggtgcgaaataatagccgccggttaccggtttggtgaaacgcaacatcgcatcacgcttaccatcggtatcgccaaacatgctcagcagttgctgctcaatgttatgcagacgcgcgcagtaggcgcagaagtacagaccgtgagtgccactggcagtgccgtacggcaggctctggcgaacaatcttcagccctttgccatcttctttcagatcaacgcgggtgaggtgagaggtttccggacgttcgtcgccgtcgatctcttcgttggcctctttggtgcgcccgatcaccatctcctgatcgtgaacgctcatccggttgagctgcttcaggttgtgttcccaacgctggacaaacacatagctgccgcccgcatccacgccgtctttgataaccgccacttcgcgacgcgtctcttcacccgccgggttttccgtaccgtcaacaaagccgctcaggtcacgctcttcaacccaacggaagccgtggatctcttctttcacttcaatgcagtcaccaaaggcttccatcgccgcctgggcgacagagaagtttacgtcgtgacgcagagaaagaatgtggatcaacacatcgaactgggtcgtcggcgcaaggcctttaccgtagcccggaaaatctttcagctcttctgccccaacgccgccgctcagagcgcgccaggtgttgttaccaaaggcaaccaccgcaccaagatgcgcgtccgggaatttcgcttcaaaagttgccagtttgtcggcaaatgttttactggccgcacgcagggcgtcaacttcccctttcacgttggcttcgatccaaatcgccgcgcggcaatgttctggcaaaatgccactctgaacctgagacattgttcctcctgaaaataataatgccacgcaatccgtggcattgttgagcgctattttacgtgttttttcgcggcggcggtttgttcagacgcaaattaacgccgccagataattttactgactttccagtttttcagggtatcgtccgaaggcattaacccttcaggaccacgccattccccgctgaactggtagctaatatgttgactgccttcggctttacattcgacggcacgattatcatcaccatcagctttttggcaattgccaaatgctttgctgtaaaggtcgctaaacggtgtaccgattttaacaccggtgtcagcaggaatatcgctatccagcacgtcaatgcgactgatcgtgccttgatcgccgttaatcaccatcgccacgttgtcgcccttcatcacttcaaaaaagcgcaccacgttgccgttcgcggttttcattccgctgcgcaggcgataatcgccatcaagcgcatcggcaatggcttgttcttgcagtggtgtggacgccgttaattcacccacgccctgctcgctcactttggtggacgacccaaaccagttccacgggttagcggcagaccagttaactgacgacatcgtggaacagccggtcagcatcaatggcatagcgcataacattaaacgcagcgatttcatgtcacttcctttggttattcaataacgttgcttggagtgcaaattcaccaaaaagtgccgttattcttttacttcataaaaacaagcgcgtaaacgtcgattggtcagcagccagattaacgccacaatatccgccactaccagcgccagaccgataccgctaacggattcaccgttcagccacagccacggttgccagcaaagtaaaaccacctgcgccaacagcaacagaaaatagagtacacgccaggtgcgaggaaacgtagcccgccgaccgctcaacaaaaacgccagcaccgccggaatgccaggaatcagccccagccagaaattatcgtgatcgggataaaacagatttagcagcgcagtaccctgctcgcgcgacgcaccggcaatgacaaacagcacccaggttcgcgcctgaagcaatagcacaagccagaagagcaagggtaaacgcaggcgaccgtgcgcatcataatggacaggatgaaactcagtactcttcatcttcaatcaaacgcttacccagactcagcacgtcggcgtgttcatatcccaggcgttcatacattccgagcaccatgtcgttatcttccggcacattgatctgaattttcgggcagccacgagcaatcagctttttctccagccgattaagcaacgcattggcaatcccacgcccacgaaactctggatgcacgccaagataataagcagacccgcgatgcccgtcataaccgcccatcaccgttccgaccacgtcaccgtttacctcagcgaccaaaaacaaactgacgtcatggttcatcttacgctcgatgtccatttccggatcgttccacggacgcagcaagtcgcaacgctcccaaagggtgatgacctcttcgaaatcttcctggcgaaatacgcgtatctccatggtattcgttacctttttgcgggttaaaaggctgattatggcgtgaacggtcgaattagccaatatctgacgaaaatcggttgaaaaagtggcataatggggagttgtcaactattgaaatgaaaagtaaaacaattctcaacagcaaaccgtcgtaacggattacgcgatacgatataacatctggaactttattattacaactcaggccgtatgagcacttttaaaccactaaaaacactcacttcgcgccgccaggtgctgaaagccggtttggctgccctgacgttgtcaggaatgtcgcaagccatcgccaaagacgaacttttaaaaaccagcaacggacacagcaagccgaaagccaaaaaatctggcggcaaacgtgtcgttgttctcgatccaggtcacggcggaattgataccggagcgatcggacgcaacggttcgaaagaaaaacatgtggtgctggcgattgctaaaaacgtccgttccattttgcgtaatcatgggattgatgcgcgtttaacgcgttctggcgatacgtttatcccactttacgatcgcgttgaaatcgcccataaacatggcgcagatctgtttatgtcaattcatgccgatggctttaccaacccgaaagctgccggtgcttcggtatttgccctctctaaccgtggggcaagtagcgcaatggcgaaatacctgtctgaacgcgaaaaccgcgccgatgaagttgccggtaaaaaggcgactgacaaggatcacctattgcaacaagtgctgtttgatctggtgcaaacagataccattaaaaatagtctgacgctcggctcgcatattctgaagaagattaagccggtgcataaactgcacagccgcaacaccgaacaagcggcatttgtggtgttgaaatcaccgtcggttccttcggtgctggtggaaacctcgtttatcaccaacccggaagaagaacggctgttaggcacggcggcgtttcgtcagaaaatcgccacagcgattgctgaaggcgtgatcagttatttccactggttcgacaaccagaaagcacattcgaaaaagcgataagttatgaaacccgacgcacaccaggttaaacagtttctgctcaaccttcaggatacgatttgtcagcagctgaccgccgtcgatggcgcagaatttgtcgaagatagttggcagcgcgaagctggcggcggcgggcgtagtcgggtgttgcgtaatggtggtgttttcgaacaggcaggcgtcaacttttcgcatgtccacggtgaggcgatgcctgcttccgccaccgctcatcgcccggaacttgccgggcgcagtttcgaggcgatgggcgtttcactggtagtgcatccgcataacccgtatgttcccaccagccacgcgaatgtgcggttttttattgccgaaaaaccgggtgccgatcccgtctggtggtttggcggtggcttcgacttaaccccattctatggttttgaagaagatgctattcactggcatcgcaccgcccgtgacctgtgcctgccatttggcgaagacgtttatccccgttacaaaaagtggtgcgacgaatacttctacctcaaacatcgcaacgaacagcgcggtattggcgggctgttctttgatgacctgaacacgccagatttcgaccgctgttttgcctttatgcaggcggtaggcaaaggctacaccgacgcttatttaccaattgtcgagcgacggaaagcgatggcctacggcgagcgcgagcgcaatttccagttatatcgtcgcggtcgttatgtcgagttcaatctggtctgggatcgcggcacgctgtttggcctgcaaactggcgggcgcaccgagtctatcctgatgtcaatgccgccactggtacgctgggaatatgattatcagccaaaagatggcagcccagaagcggcgttaagtgagtttattaaggtcagggattgggtgtaactccctcacccccactcccgcatccgctgatgcagcgtcagtgacggcttctcggaaaacagctgctggtaatccgtggcaaattgccccagatgccagaatccccactgcatggcggcgtcttttaccgtcatactttgcgaccacggacttatcagttcgcggcgtacggcgttcaggcgaatgcgtttcagccacgcgttcgggccaatgcctaaaatagcgtgaaacgcgttttgtagcgtgcggcggctgacatgcagttgattacacaaatccagcaccgtcaccggttcggacatgttttccagcacatattcacgggcgcgggaaagcaatcgacggtaactctgatgactgatgctttccgccgtcaccattggttgcgcttcttccagcatggcccccatcgccattagcaaattatcccccagcacttttcgcactgcaggctgatggagattttccggattctcgcaaaacgtcgccagcgcctgttggacaaagccccacagcgcggctttatgctgctctttcacttccagcgccgactggttacgcaacatatgtaatacccgatccgggttatgcaaaaagttagcctgccgggtgatgacatcttcagaaagcaccacgcccaggatcgtgtaatcatccggcgtgctcagttcaaattcagtgccaccagggcgggtggcgatttccgcgcttcccagacattgcgaaccgataaatccctgctcaccgcgcgtcgccggaatgccaaaccagaacgagttcggccagaccaggcacgactgacgcagcgccagaccggtgtattcacgaaaaacctgaatatcatcgagtagaatttccgtaaattcaccatgaaacttgcccggatgcagctgatcgtaaatctgctgccaggcggtaatcgttaaagcatgttcatagacatccgttgtctgtcgttgatgaacattatccacttcgaccttcggcgtgagcttcaggttttcgggtaagggttcatgataaagatggtgcaaattggctgtacgggtctttttcatgatgttaatgccgggtgttgtaggacacccggcacctccgacaggttaatggggcttgagacgataacgactactgcgtttacgtaacgtcccggcagaaaagagctgttcgagcgcatttctggctttttccagcggccagccaaagtgggcagccacttctcctgccgtcattccctgacgtactgatgttaacagcgccaacaactcgtcagcagattccgcgacgataactggcgcgtcgggttcccttacgggttgcttcggctggcggttaaagccagtaaccagccactgggtgtcatcgtctggccgaccgatctccttgcggctgatgacacgcccggtacgcatcgcggcagcacaacctgcgtccagcgccgcacgacacgccgccagatcgccttccaccaccagcgttaagcgaccagggtcaagcacttcgtgactgagcagacgaacgttagctgctttgagcatggcatccgctgcatctatcgcggcgaccatgccgtccacttccagcaatcccagtgcattgatcatcggcaacctccgttacgcacgctggattggattacgcgcgatttccagcactgcatcggtaaaggcgttacaggctgctttacacgctgcctggctaccggttaaaaatgctgccgagtagttggtttcagacggtggcgggacataggtcgccagctgtacgtcggcagacttcagggctgcatcaatgccataggtcgcttccagcggcggtgccaccagatacgccatcggatcgccaagcgtgatcccggcggttgatgagagataagaaccggtacgcgaaactacatgtgccaggaatgccgtatcttgcgcgtcattagcccactggaaagctgcgccattttcaatatgcgcaatcatcgcatccagacctgcacgcacttccgccgggtttggcccaccaagcataatcagcacttcaccggcagtcggtgacgggccgtgtgcagcgcccgcatatagcgagcggccatacaccacttccaccatcgcctgcttggtcgcttcatcagcggcaatgtaggtgacgtcatcggagtcggcagaaatcagaccgaggctacgaatatgcggcggcaatttcagttcacgcgcaaaatcggcgttaacggaggcaatcacccgcatagcggtgacagacggtcgaatcaaatctaaagctggcatgatgcctccttatcgggtcatgttgatgccggatgctttctgctccagcatacgtttcgccaaatccacaatgacggctgcggcttcaaccggcggcgtgccgccctggtgaatgttagagatacaggtgcgatcggcctcaacggtggtcgccatacgcggcgagtaaacggcgtagcaggagaggctttctgactgacccaaccccggacgttcgcccaccagcaggatcactactttcgcgccgaggatctcaccgatctgatcttcaatcttcacgcgaccataacgaacaaagaatggtgtaccgactttcagcccggcctgtttcaggcccgccatcagcggtggcaggatctcttcgtagttcacggtgatcgcatcagttgacaggccatcagaaataacgacctgtacgtccggattggcaacacactgcgctttcagcgcttcaacagcttctgcacacaggcggcggcccatatccgggcgagtcaggtagagatttttgtcgctaatttcagagcgtacttccagcaagccctgcgctttcacccactcttccggcacttctttcagtacggtatctttcgaacgagagtgatcggccaggaaacgcagcagcgcctgcgtacgtggacgcggaccggcacgaccggtacaaacgcgggccacggtgctgcggcgcagttctgttaatacgtctgcgcgatgcggattttcaacaccaatccacgcttttgcttcagcggaacctaaatccagcgcacagctttccgaggtcaccggtgccgcacagttggtggtggcgcactttgcttctgacggcgcgggggccgcttgtcccattgacgccatcacgctgcgtacaatttcttcaatctgtttttgatccatgatatgttatctccgcgtcatcagaagaacagtgacggatcgcccgcccgtttggtcaggcgaccgtttgccataatgcccatgctttccagccagcgttcaaactccggtgacgggcgcaggttgagtaactgacgcacagtggcggtatcgtggaatgcggtggtctggtagttgagcatgatgtcatcacccagcggcatccccatgatgtagttgcagcctgcggtggcgagcaggatcatcaggttttcgttgaggttctggtcagcgtcagcgtggttggtataacagcagtcacagcccatagagatgccgctcagcttgcccataaagtgatcttctaagccagcacggataatctggcggtcgttgtagagatactccggcccaataaagccgaccacggtgttgacgataaacggatcgtaatgacgcgccagcccgtagttacgtgcttccatcgttacctggtctgcgccgaagttagcgccagcggatagcgcagagccttgtccggtttcgaagtagaggcagttttccccggcgatacggttgaactccgcgcccactgcgcgcgcttcgtcgagcatcgccagctccacgccaaactctttcagccctttttcgctgccacagatactctggaaaatcagcccgcccggtgcgccacgacggatcgcttcgatctgggtggtgacgtgcgccagtacacagccctgagttgggatgttgaatttgtcgatcacgccatagatggtatccaacacgcggcttaagttttccacgtcgtcagtcaccgggttaacgccgatcaccgcatcgcccaccccgaaggaaagcccttcgtagatttgcgcggcgatactttgcacgtcgtcacgggtgtcatttggctgcaaacgggcgctaaaggtgcccggaataccgatggtggtattggcctttttgattaccggcattttcttcgcgccgtagatcaggtccgcgttggagcaaatcttcgctaccgccgcgaccacttccgaggtcagccctttgcgggtaaaggcaatgtcgtccacgctggtttcatcgctcagcacatactcacgcagttcgctgatgctccagtttttaatctggttgtaggccgtttcgttaacatcgtcctgaatcagccgcgtcacgcagtcatcttcataggcaatcaccggattattgcggatgtccgctacggtcatttccgacaacacctgctttgccgccacgcgctcctgtgagcttgccgctgcgacgcccgccagcacatcccccgaacgcagttcgttggctttagccagcacctcttttacatccttaaactgatatacattgccgaacaatgtggtctttagtttcataagtcgttccctcaggaagaatcgatgattggcatttttcacagcattctaacaatcacgtttcatcgtcagcccttgtcgtgtaaggtggttgcctaaacacgcccgttattcatcacgccgaacgcgccggatacatgatcggggttatccagtcgttaaatcaaggtatccggttttgagcaagacaccactcacagcaaaggccatagacgccgcacagccgcaggacaagccctataaactcaccgattcactgacgccggggctgtttttgctggtgcatcccaacggttcgaaatactggcgattcaggtattggctgaataaacgagagtttttgcaggccattggagtttacccgctaatcacactcaaagaagcacgcaggcgcgccacggagagcagatcccttattgccaatggaattaacccagtggaacaagcccgcaaggaaaaagccattgatgcgctcaacatggcggcaggatttaagaaggtggcggaagactggtttgctaccagggttggagggtggtcggaatcctatgcaaaacaggtcagatcggcactagaaaaagacgtctatccggtacttggcaagcggtcgattgtcgatataaccgcccgtgacgtgctggcattactccagaagaaagaacgtaccgcaccggagcaggcccgcaagctacgccggcgcatcggtgagatcttcaagtttgccgttatcaccgaactggtaacgaggaatccggttgcagatcttgatacggcactgaaggcccgccgacctggtcacaacgcgtggataccgattagtgaaattccggccttctacaaagcccttgagagggccgggagcgtccagattcagacggcaatacgtttgcttatattaacggcattaaggaccgcagaactgcgtttgtgccgttgggaatggataaacctggaggacgcaacaatcacattgcccgctgaagtcatgaaggcccgccgcccgcatgtggtcccgctatcacggcaggcggtcgagctattgcaggaccagttcacacgcagcggatacagtgctttcgtctttccaggccgattcatggataaacccttgtcagccagcgcgatacttaaagcgcttgagcgtatcgggtacaagtcgatagccacaggccacggctggcgcacaacgttcagcaccgcacttaacgaatcaggcagatactcgccggattggattgagatccaactagcccacgtcccgaagggaataaggggcgtttataaccaggctgcctacctgaagcaacggcgagcaatgatgcaggattacgccgacgctattgattcaatattggcaggtaacggcaatcctctagaaccggaatgaataattaagcggcttttttgcaaagcgcaattttgcattttgtataagtatttgttttgtgtggtttaactatcacctgataagaaacctgtattcaatttgccggattcgtccggcttttctttttcgctaattattccattattccaattaagtggaataaattattcaatatcaagaacttaaatccatgtttgcaacgaaagatccagagttcgaaaataggatcaacacaaataaaagcccccggaatgctgcaacatgccgggggcggtatgagaaacaagctaaaggagaatttctcatgtctgatatgctagcagtagaacaagaaacaaacaatgatgttcgtcaatttttaaacaaaattaacgagttacggaataaagcacccaaaaacgaagagactaaacacgaagaacacacgccagataatcacgaggaaacagatcatcacgaggcaaaacagcaggagcaagcctggcgtggcaacctgcgctacctggacacattaaaccgacttgatgaagtattgccccgcaaactgtacgaaagatgggagaaagaacatacagtcaacgacgaggctgtgctacgtgctctttgttacttcgctggtactggcaaaaactcacagttgggatggtgcagggttggtaggggaacaatcgacaaacgagccaggctatcaaaaaacacggttaaaaaatgcctcgatcgtctggtcaaccacttcaaacttgttgagcgtactgaaggctatataccaggatcggcagaaagggagtgcaacgaataccagttattattcaagccgtacaacatgaaataacggaatcaggcgggcaatgttcccgccttttctttgccttaattccatgaattcaggtgggtcaaaagttgccgttagtggtgggtcaaaagttgccgttaaggtgggtcaaaagttgccgttaaggtgggtcaaaagttgccgagtaagaattctactattaagaattctaggcgacgggagttttttagcctcccggtcggtcatagagagtcgcctagagttaaacagaagaattatttcgccgcctgataggtcggctggttgcgagcattaaccatgctgattagcgcaatcatttccagcaagctggaaacgcccattcactcacgcacaacctgaacagcagaccaacaaaccatcatggcattcgttcatggggagcgcggtatatctcaaagggtgatttcttattggtgggccttcggaaggcttcgagcaattgccagcttaaaagacgggcttagcagtgatggttatccgccacgaatgtccgtcatattgcattgcgcagaaacgcgtggcactgagggagttttccgaattagttttggggaccctttccctgcttctggagcaaaagacgaacggcaaatgcagtgcttccttgtacgactgcagcgaagaagaaaagctgtttgttaagcgcctgaagttaatcaaagcggatatccacgcccagctgaaggcctgtgattgcgatatttctgaatgacaggtggaatcatgaaacacgtttttaaatatcttgattttgcagaagaccgcgaacacgcagaatcagtggcgaccaaagagttaaaactggaccacgtagaaaaattcgctatccgcgatctagccaatgatatcaaagagcgtgggtgtgttgagcttgtccagcctggtggattcgatgagctggttcagatctatgaggccggaggcgatggaatagagccactcaattgtggaatcgaatcaaggaaggtggcaattgctgccctgcttcgcgtcatgcgtgaaccagactttcaatgcctggaaatggttcacgaaatcataagaattgctagagatttggaagcgccagttgacgctccgttagattgctaacgccaaaattagcgctgaattaatgggtaattattgcggtttttgtcaattttcaacctcaattcttgcgaaaaatggcaaaaataacggtatttttcatcatttattgggggttttatggaaggcgaactgatagaaaacaatgggttagacatttatgacaccagcgaaacaccgaaaaagcgcggtcggccagctaaatataatgaaaaaatagcaacgcaaatcgtcctattggtaagcgaaggttatagtttgcgcaagatcagcatgatgccagggatgccgagccaccgtcagatgatgcgctggcaactggagcatatggacttcagggaagggatagcctggatgtcgtggctatggtgcgctgaagctggccgacgtgccgtcgagataatcgacgaggttgatataaacgcagaggatgggccgaagcagttgcgcaaagcagaagcaaaggcaaaggcactactggcagcagccaagctgaatagtttgaaacattcaccatttggagatgacaaacaatgagcctgatccgcactgaaaccagagacacaaaacgcgcagctgacccactgcacgacctgcgtagcaagccgttttctgagtggggcgaagatgaaatcaggcgttttaatctgatagacgcgcttcttgagtttgtctacacagacacatccagcccgttcggtatcggcatgaccttcgattacacggagtgctgggaaattggtgttcgtgacgactgcctggtaatgacacgcgttaagccggtgcatccagaatatgcgaagcactggaacatgaaaggcgtcatgaatgacaaaacccgcttccacgccgacaagtgggtagggtacagcaaggtgcttgcctgggtgagcttatcgcacaaagacaccttcacgggtgcgaaacggtttcaatacttccaaacgatgtacgacatggaacggcaaatcaacgcaaacctgccggttggcggccttcccaacgttgacacagagcgaactggcaaactgttccaacgcgatgacttttctgaggatagccatgccaacgatccgaagttggttggtgatgattacgtcccccaggcaccggagcaaatcaactgaattttcggacaaacgcgcgcgtagccgacgtcagcggcaagactggcggtcatttccccgctcctacgcgaaaaatccctcacaactaccctgcaaattttccagatttcacgtacacgcgccaaaaataaaggcccaggcagttagcaacctacccgggcctttctcacaatccccgctgacattatatcacccatctttccgttttcaggtgggagactgatggccgccgacgttgcacaattgattaatttctgaacattcaaatcaactcccaccaaagccaacaagatgggaggtgaattttgtgatgcagatcgctttttcccttcaggcatttttgtttaattcaatcaacgaaaggcagttcccaacaacaaaataaagatgggaggtaaaaatgaaacggtgggaagtggctttactggtgatggtaatgttggtttgctgtattgaactgtgaaggaggacgccatgaaacttttaatcgcaatcatcctgatggtgctgactggtgtttgctttgcagatgttggtgattacaggctgaacggggaggataacgcaagaattgaatcagtcgttactgataactgtgaaaaaacagccgtattggtaggcggtgacaggcttgcgagggttgagatcgaatatatagcgacattgtgcaagccggtggctttggtgattatttacgacagatttgacgatatagcggcaatccctcttaaggtgacgttgaaaaaggtattgaaagagaatagcgatgaaaagattaacctattgaacaagatgggggatctggctggtcgtatcgttgcagagcagtatttaggcatgagttttgagtaaggaggcaatcatgaaagtgttaggtaatattttatggtgggcttttgttggtttcatggcttacgccactttgattaagccggacaacactgatccagctgttgtgaactatgaagagcctttgcctatggagcttgccaactatggcgaaccaggtgaaggggcgaaaatcatgaatgccgcaaaaataatgggtcgcgactacgcatggaaacatgtaaaagaagacaggttgccatgtctgtttgccgccggggttgttgctgataacatcctggtaaaataccatttcagcaatgaaactgagttcaaacttaaagcggcagcggtcagagaatgcgccaacgtagcagaaaacaacggctttgttttggtaggtagagtatttgaaaaacgtaattgattgcgaatagcaacaactaaacaaccaatacacccggcccctcgccgggttttttgtgatctgcgtcaatattcccttccgttacgcttaccctccaccaatacgcgtgttaacctcccaatggattctatgagatgggagataaaaatcatgagttacgaaatcaaaatttgcgacatcctcaaaggcgctgcgatggaaggacaatataagggcgctcaacgtggggccaaatgcgaggagatcgcaaacgagttaactcgccggggagttaaaaacaacaagggagaggttattactaagggcggcgttagccattggctggaaggtagacgggagccaaatttcgacactctggctgaactgtgcgacatgttcggcgtttatgccctgatgccgatgcgtggcggtaaatggattcgagttcacccggaagaccgtggagaaatggaattacgcgaggctgtagctgaacgagatgctattatcgacgacctgaaggcccgtatcgctgagcttgaggcggcactagcaaataaacaagtcccagcagaagcggaagagatgggaggtgaaaaagtggaagaagtggcagcagagcaagcgcccaacgatgaaaaagagatgggagctaaggagtgggttaacccgaacccgaaaaaatacagcgtcggcatgttgtgtcaggtactggctgcaatgggcggcgaatacctgggcaacaacgcagggttacagcagaagatcactgtgttggataacgacggcaaccggaagccaatcagtaacggcgcgttttatcgactgattgagcaggccaaagggagaggattgattagcgttgaacaggaaatcaaacacaagaaagacgaaaacggcaaccagatcggcaaaggcaagaaaggtgacaagctgataactttgcttcccaactggattgataagctgggagacgaataaaccagccttcaaccccatctcatcaatcaacgcccggccccgctgccgggtttttgctatgcaccacaattaccccaaccggatacacagccggatacaattccaccagcacccagccacccagcgccaccgctggcgaataccgcattcaggaaggaaatgcgagtgatttcaccgtcaccggcacaaccgatccgccaaaaagaggcgtaccaatgtcgatatagtcccccgcgcggacaatcacttcgtcaatgactgccaacgggagttgttgtagctgtgggcgcaacaacatgcccagagctttaccaaagtcctgcccggccaccaccagcaggggatgcggattcggaaaacgcgcgacgaaatcgaccaacgcgttgatgaccgtcagtaccgcggcgtaacgcacaggcagcgaggcgggaagcgccagcacgtacgcgtcagttttgggatcaagatccagctgaatcagcgcctgttgccaggcccccaccagatccgtttcatcaatcgggatcgccaccggcaaattgcgcagcggcagttgtacgccctcaagccagattgtgctgccagagagcgaaagggtatgcgcgcccgcgccaatcaccgtggcgcgcacggtttgcgccggaaactgtacgttcatctcacgcaggcgcggatggtcatgcagcgcagttgccagcagcgggccaatatcggcaaaacagaacgggtcggcgggctggtggcgataacattcgcccacgccgccagaaagcgtaatgatttcgggcgtaacacctgcgggcagcaaaccggtttgcatcaatgcctgcgcgagcggtgagagcgttccgtcaatcacttcgacaatcagttctgccatccgccgggtcacctgcaccagctgcgcgccggtcagcgaacgggcgtcggtgcctgcaccgaagcactcatccacaatcatctgccccggtttatgagcgtaaaccacgcgcccgtggctgtcggtttccagcaggcgaccaccgacgttgaggcaggcagtgccgctgatttttccggcatcgaacagggcgtagttcgcggtgccaccgccgatgtcgatattcagtacccgacacagccgttgttcagaaagggtttgtgccccggctccgtgaccggcgatcacggattcgaggtgcggcccggcgctggcaacgacaaaatcgcccagcgactgagagagcgccatcaccgccgggcgagcattgcgggttttcgcgctttcaccggtgatgatgatggcaccagaatcaacgctttccggctcaatacccgcagcatgatattgctcgagtattaaggttttcagttccgcttcttttaaaccgccctgtttatcgacaggggtaaagaacaccggactttgccagctaatttcgcgtttaatgaattcgtagcgcggcacctgcgacaccgccgcacggttaaccagctccagccgggagaaaatcacctgggtggtggtggtgccgatatcgataccgacgctcaatagctggcgagtgttcacgattgtgcctccgcttcggttttagtcgcggtcgcgtcttcttttggcaccagcatcatcgccacgccaatcgccgttacgccgccgatcaacttgccgacaatcatcgggaagatcatggcgttcatgttggcagcggcgaagcctaagtggtcgcccagggcgaaagcagcggaaacggcgaaggcgcagttgatgactttgccgcgggtatccatctgcttcatcatgccgaacatcgggatgttgttggcaagcgttgccaccatgccggctgccgcgatgttgttcatattcagtactttaccgacgctcatcagcggtttttcaaaccagcgagtcagcagcagcaccatcggatacgcccctaacagaacgcaggagatagaaccgataacttcaatggcgcgcatcacctcaccgggtttatcgccaggggccataaagataggatccagaccggggatcagttcccagccaagcaggaatttcactaccgcagcggcaagaccgagggtgatcaatgcaacgaggaatttggcgaagatctggaagccgttgatcattttttccgggatgaatttcagccccagcgccaccagaatcgcaacaatgatcaccgggatcatgttcatcaggatcagggcgaaagtgaattccaccggctggccgttgatctgcacaccggagtacatagcaaccagaccaccagcgatacaaccaatcggaatggtcacaatgcccgccagcacgccgagcgccagataacgacggtcagaaggttcgataatgccgagcgccaccggaatggaaaacacaatcgttggccccatcatcgacccgagaattaacccagagtatagccacgcggctacgtcgccgcccgccagctctttggcgaggaagaagccgcccatatcgcacgccagcagtgttccggcgaacatcgatgggttagcgccgagcatttcgtaaaccggaataattaccggcccgagaacgtgagccagtaccggtgccagcgcggtcataccgaccatcgccaggcccagtgcgcccattgccataaagccttcttcgaactgaccgcctgatccttcgatacttttaccgaacttaccgaggaaacgagcagaaccgccgaactgcgacaggatcctgtctacggcagctatcagcataaagaacatcatgatgtacatgatgatttcgttaattcccatcgcctttactccctgttagttgttatttattggcggatgcggcgtaaacgccttatccgccctacatgtgcaatcccgtaggctggataagacgcggcaagcgtcgcatccggcaattgcaccgcgccactggcggatgcggcgtgaacgccttatccgccctacatgtgcaatcccgtaggctggataagatgcggcaagcgtcgcatccggcatttattgcgccgctgcgtacaggccgacaatctgctccaggctggcggtacgcgggttactgcgcagacaaatatcttccagcgcggcctgcgcccatgcgccgtaatgcgcagatgtcgcaccaacatcgcccagtcgtttaccaatcccaacttccgcaatcagctcacttaccgcgttaatagcgtcacgatcgtcggattttttagttcgcagtgcccgaccaatctgactaaagcgttcacgacaaaccatccggttaaattccatcaccgttggcagcaacatggcgttcgcgagaccgtgcggaatatgcagcgccgcgcccggctgatgcgccatcgcgtggcacaacccaagacccgcactggaaaacgccattcccgccatacatgaagccagcaacatgctctcgcgcgcggcaaggtcgtgaccgtagcccaccgctttcggcagcgatttgccaatcatcgcaatggcaccaatcgccagactgtcggtaaacggtgtagcgttcagggcgctgtatgcttcaatggcatgggttaacgcatcaatgccggtcatcgccgtgacatgcgacggcacaccttcggtcaatgcggcgtcgaggatcgccacatccggcatcagcgaggcatgggctaacacctgcttgcgcccgctcaccgcgtcgataatcaccgttacattggtggtttcagagccggttccggcggtagttggaatggcaatcagcggcaagcgcggttgcagaacgctggtttctgacatctctgccagcgtgctatccgggttcgtcaccagcaacgtcacggctttcgccgcatccagcaccgagccgccgccaaacgcgatcaccccatcacagcctgactcacgcaactgcgccacggctgcacacacgtcggtaatgcacggttcgcccaccggacatggccagagcgtcatggcgatacctttaacggtcaggctacgcgtcagcccggcggtcatccctgcctgatgcaaaaagctgtctgccatcacgaacagatgtttcagcccacgcgtttgcgcttgctgtccgcaactgctcaccgagcccggaccgcaaagcgtcaccggtggaacgctaaatgtttttacccgttgcagattcagggtatcgaacgcctgaaagagcgcggtctgcaattcattttgcatatagcccctccgctttctctcgcccactactggcgatcgccagcggggtcataaacaaactgtgctgcggtaaatgcacctgtaacgccgggaattgtttgcgaaacagttccgccacgcccggttgcatacaagagccgcccgccagccataaatcagtaatgccctgcccttcaatatgccgggcgacaatgtccgccattttttcgtacaccggtttcaccgcaggccaaatctcttcaccgtgaccgcgcttgtactgctccgcctcttccagcgaaatacggcgatttccggcgagagtcagagagatgtgatgtccgccggtggcttcatccgccgagtacgtcaccttgccctttttcacgatggcaatgccggtagtgccgccgccgatatccactacaccggcgttgtccagttgcagcagatccgcaactgcggttggctcatccagcacatggctcacttccagtccggcagattccagcacgttgatggaaatacgcgggtccgtacctggaggaaatgaagtcgccgcatggctaaaacgacgaccgaattgctgctcgagcgtgtcgagatggcgacgaacaatggtgacagcgccgaagaaatcccagacgatgccgtcgcgaaccacatcggcccagtcgaggcataccgccactggctgaccgtcgcggtcgacaaccatcgacaccacatcgcaggtgcccagatccacccccagccacagcggagattccgtcgcggcgggcgtctggttacacagcgttgccgccgtttgcagacgtggggtgagccattgttcgtcgtgcgccatctgttactccttaaacaatgcgaaacgcatcgactaatacacagcgacgcagacggacaaacgtacgcgcgctggttaccccttcaccggttggcgtggtgatggtcatggtggtccagccttccccgcccagccccagcccggcaatgcacggtccgttcttaacgaaaatgctggtatcaatagcattcgccatctggttcatgttttcgatgttgcgcgagtgcattgccgccgtgtggtggcaaccgccttccagtttcaccgctagcgcaatggcatccgccacgttggcgacgcgcacgacgggcaacaccggcatcatcagttcagtcacggcaaacggatgttctgcggtggtttccacaaacagcaggcgcgtttcttgcggaactttaaggccgattgccgccgcgattttgcctgcgtcgcgaccaacccagtcacggctgacggtgccttttccgcgctcgtcgatatttttcagcaacaccggttgcagctgctgcgcctgttctgcggtcagtttcaccgcgtgctggccttccatcagacgcatcagttcatcggctacgctatcaacaacaatcagtaccttttcgtcggcacaaatgatgttgttatcgaaagaagcgcctttgacgatggactgagcggcacgggcgaggtcggcggtttcatccaccactaccggcgggttgccagcgcctgcggcaatcagacgtttattggtgtgtttacgcgccgcttctactaccgcttcgccgccggttaccaccagcaggccgatacccggaaacttgaacaagcgttgcgcggtttcgatatccggatttgccacagtaaccagtaagttttccggcccacctgcggcaacaatcgcctggttgagcagcgtaatcgcccgctgggagacttttttcgccgccggatgcggggcaaaaatgacgctgttgcccgcggcaatcaggctgatggcgttgttaattacggttgccgccgggttagtggaaggcgtcaccgaagccaccacgccccagggtgcgttttcaattagggtcaggccgttgtcgccagtcagcacttgcggagagaggcactcaacgcctggtgtgccgcgcgcctgagcgacgttttttgcaaatttatcttcaacgcgccccatgccggtttcactgacggcaagttccgctaaatctctggcgtgtttttcgcctgcttcacgaatggcagcaatggctaactggcgcattgccacgctttttaacccttgctgggcgactttggctgccgcaacggcgtcatccagggacgcgaaaacgcccatctcatgaacggcggcggacggcgtgtcactgctttgcattttcagcagtaccgctttcaccacctgttcaatatcctgttgattcatgatgttctgccttatttgtggaaaattacctgaccgccagacaccacctcatcgacaatgccaatcacgcacagatcgaccggtgacgtttcgcttttatgcgcctggcgggcggaactgccactcaccagtaacacccactccccggttcccgcgccaatattgtcgatggcgacggcgcattgcccgtcaggattaccttgtggatcaatcatttccaccatcagcaatttgtcatgcgccagtccgtgatggcgtacggtacaaacaatttgtccagtgacgactgccagtttcatacccgcctccgtggcgtatttcaggtaaaagctccccctaccctccgcagaaggtaaaatgaaaaaggagagagcgtgacgcccgaatcgacgtcacacagggtgattacaggttgctgctatcgcctttcaggccgatcgggaagacttcttccaggtcgccgtgcggacgcgggataacgtgtacagataccagctcgccgatacgctgtgccgctgcggcacctgcatcggtcgcggctttacaggctgcaacatcaccacgaaccatggcagtacacaggccgccgccaatctgcttaacaccaaccagcttgacgcgcgcagctttcaccatcgcgtcagaagcctcaatcagtgcaaccaggccccgggtttcgatcattcctaatgcttccattgtgctttcctctttatcagggtccagaacgggaccgttcattcaaccagtgtttgtaaactgctttcgcggttcacttctgtctgacgcggcacagctgccaccagcgccagctcgataatttcctgcacgctacaaccacgagagagatcgtgcatcggcgcggcaagtccttgtatcagtggcccgacggcacgatatccgccgagtcgttgtgcgattttgtaaccaatatttccggcttccagcgacggaaaaaccatcacattggccttgccctgtagcgggctggcaggcgctttttgcgccgccacttccggcacgaaggcggcgtcaaactgtaactcgccatccaccaccagctttggtgcgcgctcacggacgatttctgtcgcctgctggacgttagcaacacaggggtgacgggcgctaccattgctggaaaacgacagcatcgccacgcgcggctcttctccggtgatggcgcgccaggtttcggcactggcaagcgcgatatccgccagctgcgccgccgtcggctgtggcaccacgctgcaatcggcaaagcccaacgccgggccgctgtactgtggcaacatcaggaaaatggaagagagcgttttacagcctggctgcaagccgataatgcgtaatccggcacgcagcacatttgccgtggaagagaggttgcccgcgatacagacatccgctttaccggcgctgaccattgctgcggcgaacatcagagggtcggtaagtttttccagcgcatccggcggcgttttttcgcccgcgcgggccagccagcgatgagcaaattcttcccgcattgcgaggttgccatgcggatcaatcacctgtagcccgtccatcgccacgccgtgactgagcgcaaactgacgaagttcaaacggattggcgaccagaatgggcgttgccagaccttgttgatgtaaatattgcgcggctttcagcacacgttggtctaacgcatccggaaaaaccactctggcgggcgctcgcaacgccagttcacgacaacgttcaataatcattgcgtttcccccagtcgttgttggatctgcttcaccgttagcggctgcttcgttacgctcaggatcatcatcacgtagaccgtgctcgaaaggcggttcagcgcctgcaaaatgtccgggcgtaatacttcaaagctgcgggtgataaagacctgcgccgctacggtttcggtttcccgcactttggtgcgtagcagattgagcaacgcagcatcgcgcccgtggctggcttccggcaccagatgatcgtggtcgagatagcgcagcggctgatgagaaagccgatgcagatcttcgtcagaaagcccgacaatcgcctggcagcccagcggttcccccagcgcatcggcgcgcataatgttgccaagacgcgaacggatatccgccagccacggctgccacggttccgccagttcaatttgcagccacactgccagcgcaatggtgctgtcgagaaccgcgcgaaaacccagacgcggatcgcttttggcgaccattttttccgccgacaggtgagtcagcgtatccggcttttttgccaccggctggcgacacagttcgcagcacgcctgcggatgttcatcgctactggtcagcccatgaacgggctgcggctgctgctgttcatcgtcaacaaacaggcggccctgctcgtcaataaacttgatgcgcagatggcggctttccagcaactcccgggcagagggcgtcaggcgactgtccgcagggagatggatctctgcgccttcgctgagcgtatggttcgctcttagccatgcttcggtgatgaaatctttcatagggattgccagttagccggccaggcgacatacaggaatttcacgctggatgtcgtaccaaattcgatgctggagcctttcgggataaacatcacgtcgcctgctttggcgatcatggtttggccttcgtggcgaacatgcagctccccttccagcaccatgtcgatttcgtcgtagttcagggtccacgggaagaatgcgttctcccactgcataaaaccggcggccatgctgctgccgtcgtctccggtcacaagatcagtcaagcccacgcaatgcggctctgcgccgtcgaaacgaccaaacttgacgctactgccatcaatcactttgatgccgcctttgccggtcaccgatttgaagctcggctgcattgcgccctgctccagcgactgtttttccttcatcactttttccatcagctgtgcgaccaggctttcggtaaactggccttccggcagctgggcaatgatggtttcgcggatgcgctggctttcggttttgtcggctggcacgctggcgggcacggacgccgttaccgggatcgattcatcacattcggtgatggtaaaacccagtagatccgccacttcacgggcttccggggtaataatgctggcgcgcagaaccacggacattgcctgttcgccgcgcgcgtgtgcttcacgaatatcattcgctgtgatgagttttttcacctgcttcctcctgtttggtgagagatgccagataatccaccagttgctgcacgctttgcgggtcgtggctgtttagctcgaacatcggctcttcgaaacccgtctcaagcaataactttcgcgttgcggcgacgtcagcatctggcatgtccgttttactgatgacggcgatttgccgtttgctgacgccaatatccagcaacccggcaggcaaccgactttccgggtcatttgcgccatggacatagatcagcatgtctacatcctgtagcgtggtaattaaggcgtgataccagcggggatggttaaaatattcacccggcgtatcaatatcgcccttatcattaaattccacggcctgtgtttttctggcgagggtataattcccctgcaacgcattaaataacgttgtttttcctgccccgacgctacccacaaacgcaattcgtttcatgaatgcctcgtattaacttttggtcatttcacaaagcgtataatttaataagcgacctaaaccgctgacggtttgtgataacgcttcttctactgcgcccaccgagccataaatcaccaatgcaccgctgaatcggtcgagaaaaccgatatgcacatcagcggctttcagcgctaaatcaccggcgatcatcgccgtttcgccgggagttagcgtcataatgccaattgcgcccgcatccggaacgccgattttcttcgccagttcctcaccgggatgcgcgatgagatgcgccagtgtgacctgtttgccgggcacaaattcctgaatgatgcgttctttatccatgagtcgccgcctgtgaaaaactttcgtgtatcgtgacaatttttcgtcagagtaaataacaaaattcggcaagcgcgtttaaaaggtgaggtagatcactaagaatggagagatattcgctgtggtgcataaactttcatatgcaacgcatgaatataaataaaataatatcgagatattatatagactgcttttttttattattcgcaaactcagtaataagctttactaatatattgcagctaaactgcttaccctgaatattcagggtaagcgtgagagttaaaaaaaattacagcggttgggtttgcgcttctaccacggccagcgccaccatgttgacgatacgacgcaccgatgcgatcggcgttaacacgtgaaccggtttcgccacacccatcagcaccgggccgacagtcacaccttccgagctggaaacacgcagtaagttgtaactaatgcgggcagcttccatgttcggcatcaccagaatattggcggaacctttcaaagagctgtccggcatacggtcgttgcgaatcgcttccaccagcgctgcatcgccgtgcatttcaccatcaatcatcagttctggtgcacgttccctgaccagttccagcgcctgacgcattttgctcgacgacgggcagtcagaagaaccaaagttggagtgcgacaacaaagcaacgcgcggctcaataccaaaacgacggacagtttctgccgccatcaaggtgatctccgccagctcttctgcatccggttcatcattaacatatgtatcggcaataaaggtgttaccactcggcagcagcagcgcgttcatggcacctgcggtgtgaacgccatcgcgataaccaaagacatttttcaccacgctaaaatgttcatgataatcacccaccgtaccgcaaatcattgcatcggcttccccacgctgaaccatgatcgcgccgatcactgtcgggttactgatcagcgcccgctgcgcctgttcctgagtgacgccgcgacgcttcatgatctggaagtattcggtccagtactctttaaagcgcggatcggattcgttattgacgatctcaaaatcaacgcccgctttgatctgcaagcccagtttctgaatgcgcatttcgatcacgttcggacgaccgataaggatcggtttcgccagtcccagcgttaccagttcctgagtggcatgcagaacgcgcgcctcttccccttccggcagaacaacgcgcttcggcgctttgcgagcctgggagaaaatcggcttcataaacaggttggttttgtaaacgaactcagtcagcttgtcgatgtagacgtcgaaatcagcaatcggacgagtcgccacgcccgactccatcgcggctttagcgaccgcaggagcgatcttaacgatcaagcgcggatcaaacggttttggaatgatgtattccggaccaaagctcagatcctgatcgccatacgctgaagccaccacttcgctctgttccgcatgggcgagttctgcaatcgcacgtaccgccgccagtttcatctcttcgttgatggcggttgcgccaacgtccagcgcgccacggaagatgaacgggaagcacaggacgttgttcacctggttcggatagtcagaacgaccggtgcaaatgatggcatccggacgcacttctttcgccagcggcggcagaatttccggttccgggttcgccagcgccaggatcattggcgcacgagccattttcttcaccatttcctgggtcagcactttcgggccggaacagcccaggaaaatatccgcgccttcaatcacatcatcgagggtacgtttgccgtcatccaccaccgcatatgcggctttggtttccgccatgtttggctcacggccctgatagataacgccttttgaatcgcaaaccacgatgttatgtttttgcagacccagcgctaccagcaggttcatacaggcgattgctgcggcacccgcgccggaaaccaccatccgcacgtcggagatgtttttctccaccacgcgcaagccgttgaggatggcggcagtgctgataattgccgtgccgtgctgatcgtcgtggaataccggaatattcatccgctcgcgcagtttctgttcaatatagaaacattctggcgctttaatgtcttcgaggttgatgccgccgaaggttggttcgagcgcggcgacaacttcaataaatttgtccgggtcgagttcgtcaacttcaatgtcaaatacatcaatcccggcgaatttcttaaacagaacgcccttgccttccatcaccggtttgcctgccagcgcgccaatgttgcctaaccccagcaccgccgtaccgttagagatcaccgccaccaggttacctcgggcggtatatttgtaggcttttaacgggtctttttcgatttcaagacaaggtgcggcaacgcctggtgagtaggccagcgccagatcgcgctgtgttgccagaggcttggttggagaaacctggattttccctggaactggaaattcatggaaatcaagtgcactttgttttaactggtcatccatttggttgttcctttcacgtaacgttcacaaataaagtgtgtgggcaacagcccctgcccacaacgtggcgcacattattaccctgccggagtctacagactttgagcaagtccaaactctcaccattaatataatgttttggtaataatcctataacactgatgttacctgcttaatccagcaataccatgcctgtctgctatgcttttttgatgcgtttagcgaaatttctcagaagtgtgaattaacgcactcatctaacactttacttttcaaggagtatttcctatgaacgagttagacggcatcaaacagttcaccactgtcgtggcagacagcggcgatattgagtccattcgccattatcatccccaggatgccaccaccaatccttcgctgttactcaaagctgccggattatcacaatatgagcatttaatagacgatgctatcgcctggggtaaaaaaaatggcaagacccaggaacaacaggtggtcgcagcgtgtgacaaactggcggtcaatttcggtgctgaaatcctcaaaatcgtacccggtcgcgtgtcaacagaagttgatgcacgcctctcttttgataaagaaaagagtattgagaaggcgcgccatctggtggacttgtatcagcaacaaggcgttgagaaatcacgcattctgatcaagctggcttcgacctgggaaggaattcgcgcggcagaagagctggaaaaagaaggtattaactgcaacctgacgctgctgttttcttttgcacaggcacgggcctgtgcggaagcaggcgtttttctgatttcgccgtttgtcgggcgtatttatgactggtatcaggcacgcaagccgatggacccgtatgtggtggaagaagatccgggcgttaaatcggtgcgcaatatctacgactactataagcaacaccactatgaaaccattgtgatgggcgcgagcttccgtcgcaccgaacaaatcctcgccttaaccggctgcgatcgactgactatcgcaccgaatttactgaaggagctgcaggaaaaagtttcgccagtggtacgtaaattaatcccaccttctcagacgttcccacgcccagctcccatgagcgaagcggagttccgttgggagcacaatcaggatgcgatggcggtagaaaaactgtctgaaggcattcgtctgttcgccgttgatcaacgcaaactggaagatcttcttgccgccaaactataaaccagccacggagtgttatatgtcccgaaaagaccttgccaatgcgattcgcgcactcagtatggatgcggtacaaaaagccaactctggtcatcccggcgcgccgatgggcatggctgatattgccgaagtgctgtggaacgattttcttaaacataaccctaccgacccaacctggtatgatcgcgaccgctttattctttccaacggtcacgcgtcgatgctgctctacagtttgctacatctgaccggttacgacctgccgctggaagaactgaagaacttccgtcagttgcattcgaaaaccccaggccacccggagattggctatacgccaggcgttgaaaccaccaccggcccgcttggacaaggtttggcgaacgccgtcgggctggcgatagcagagcgtacactggcggcgcagtttaaccagccagaccatgagatcgtcgatcacttcacctatgtgtttatgggcgacggctgcctgatggaaggtatttcccacgaagtctgttcgctggcaggcacgctgggactgggcaagctgattggtttttacgatcacaacggtatttccatcgacggtgaaacagaaggctggtttaccgacgatacggcaaaacgttttgaagcctatcactggcatgtgatccatgaaatcgacggtcacgatccgcaggcggtgaaggaagcgatccttgaagcgcaaagcgtgaaagataagccgtcgctgattatctgccgtacggtgattggctttggttcgccgaataaagcaggtaaggaagaggcgcacggcgcaccactgggggaagaagaagtggcgctggcacggcaaaaactgggctggcaccatccgccatttgagatccctaaagagatttatcacgcctgggatgcccgtgaaaaaggcgaaaaagcgcagcagagctggaatgagaagtttgccgcctataaaaaggctcatccgcaactggcagaagagtttacccgacggatgagcggtggtttaccgaaggactgggagaaaacgactcagaaatatatcaatgagttacaggcaaatccggcgaaaatcgctacccgtaaggcttcgcaaaatacgcttaacgcttacgggccgatgctgcctgagttgctcggcggttcggcggatctggctcccagcaacctgaccatctggaaaggttctgtttcgctgaaggaagatccagcgggcaactacattcactacggggtgcgtgaatttggcatgaccgctatcgccaacggcatcgcgcaccacggcggctttgtgccgtataccgcgacgttcctgatgtttgttgaatacgcccgtaacgccgcgcggatggcggcactgatgaaagcgcggcagattatggtttatacccacgactcaattggcctgggcgaagatggtccgacgcaccaggctgttgagcaactggccagcctgcgcttaacgccaaatttcagcacctggcgaccgtgcgatcaggtggaagcggcggtgggctggaagctggcggttgagcgccacaacggaccgacggcactgatcctctcaaggcagaatctggcccaggtggaacgtacgccggatcaggttaaagagattgctcgtggcggttatgtgctgaaagacagcggcggtaagccagatattattctgattgccaccggttcagagatggaaattaccctgcaagcggcagagaaattagcaggagaaggtcgcaatgtacgcgtagtttccctgccctcgaccgatattttcgacgcccaggatgaggaatatcgggagtcggtgttgccttctaacgttgcggctcgcgtggcggtggaagcaggtattgccgattactggtacaagtatgttggtctgaaaggggcaattgtcgggatgacgggttacggggaatctgctccggcggataagctgttcccgttctttggctttaccgccgagaatattgtggcaaaagcgcataaggtgctgggagtgaaaggtgcctgatggtgattgccggatgctgattgccggatgcgacgctgacgcgtcttatccggcctacagcgtcttatccggcctacatgtcccgccattttgtttaacgggtgatccacaacgtgggccaggcgtctggcccatgccagttatcgcaggtgggttctgcggcgtaacgcaccaggcgaaaacgctgaccgtcaaagcgccagcgcgcctgaatgccacaatcgcttaatccgcgccctttcgctaaggtcaccagttcacgcgatttctcatcaaatgttgcgttcatcagttccagttcattcgtctcctgaccgttgttgaacggcaaacgcaaccgaaccgggcgcgaagctagtggctttttacgcgacacaatccatgccaaatcaatggtgttataggcccctgcctcacagctaatcatcatcagcgctttatcatcagtcagcgcagtgacattcacctcacgacgcaatggatcaagcgagcagcgcagaccattcatccgccagtttccataatccagcaaatcgttgcgttcttcgagtgagagtggcgtcggcgttgggttaaccaccgcgacctctttcagcgcaggcgcgggcggtacgctgagcggcggttcgtcccctttcttgatccacgcggtttcactgccaacgcgcttttgctgagcatcaataaacaacaacgctgcttttaagccactcagagaaatggtctgatcgccatcgcgtaaggtgattgccttcccttcctgaatcatctgcaaaaacgcggtgatggttgccgtatcatcggttactaataaccatggtgaaatccgccacttgtcaccacttaacgccaacggctcgccatctaacagcagccgtggcgctatctccccttctgacgcctccggcgacttcaatccgccgcgctcaatacgtaaaacggcatcggtatgcgccccggcgctgcggctcagggtcatcaccagtccattatgatcgcccgtattacgcgccacgcagaaattttggttattacaggtgacctgccagtcggaaaacgcccgttgcgctggtgccgcccacaccaaagacgtcggcaacaaagcgaaaaaaaagagaaggaaaatgcgatagcgcatggacggtacgaccccagaagttcaaacaaacagcacaagtcgtatcttcgttgcgcaggtagcgcggctcaatcggatttgtcggattgagccaataataaacaacgaaatattattgttatttttcagtccattaaatgtgacgtttgcaaatagttaagcaataacaccgtcttaccgtcacgtatctcgccggttttgatcatctccagcgcctggctgaacggcagctcgagcacttcaatatcttcatcttcgacaccgccaccggcgttagcgcgctgattgtcactgtattcggcgataaaaaagtggattagctcagtcacaccgcctggcgacatatacagttcaaataatttgcgcacttcacccacttcatagcccgtctcttcaatcgcttctttgcgaatacacacttccggttcgtcgttatccagcagcccggcgcagctttcaatcagctgcccgctttcattgccattaacccaggtagcgacacggaactgacgaatcagaaccacggtctttttcttcgtgttgtacaggaggatcgtcgcaccattgccgcgatcgtacacttcacgtttatggcggataacttcgccgtctttgcgcgtgagatcgtaagtaatgttgtgcagggtgaaatagttatcggagagaattttgtctttaatgagggtgatttgttgcgtcataccgactccacagcgcgaaatgaacaattatcttacgctgtgaagtcgggtttgtctgcgcaggctatcagtgagatttgactgattttacccccagccagtcaataatcccctgtgccgcatgacgtccttctgccattgcggtaaccaccagatccgcaccacgcacggcgtcaccaccagcgaagattttcggattggtggtctggtaacggtactggctttccacatccgcgatgatgcggccccatttgtctaccgttacaccgtgcgactccagccacggcatcccgtgcggattgaagccaaacgccataatcaccgcgtcggctggcatgacaaattcactgccttccaccggcactggacgccgacgcccctgggcatccggctctccaagacgcgtgcgcaggaaacgaatcccgcagacgtgaccttgttcattcagctcaagcgccaccggctggacgttaaattcgaagttggccccctcttcgcgggcgttcttcacttctttcttcgagcctggcatgttagcttcatcacgacgataagcgcaggtgacgttactcgcgccgtggcgcagtgcggtacgcacacagtccatcgcggtgtcgccgccgcccagtaccacgacgttaagtccggcggtattgataaacggctcttccggtagctcttcgagccccatcacctgtttagtgttggcaatgaggaacggcagcgcgtcataaacgcccggcgcatcttcattgggtaaacccgctttcatggaacggtaagtgcctacgccaacgaagaccgcgtcgtattgttccaaaagcgaatccaaagagacatctttacccacttcacaattgagttcgaagtgaatccccatcgcgctgaagatttcccgacggcgtgccagcagggatttatccagtttgaaagaaggaatgccgaaagtgagcaagccaccgatttctggatggcgatcgtacaccgtcacccccacgccattgcgggtcagaacatccgcacaggccagccctgccggacctgcaccgataatcgccacccgcttgtccactttggtgacatggcttaagtcaggacgccaacctttcgccaacgcctgatctgaaatgtagcgttcaatgttgccgatagttaccgcgccgtgctcatcgcgaatagtacaggcaccttcacacaaacggtcttgcggacaaacgcgtccggtaatttccggcagggtgttggtctggtgagaaagctcgacggcggcgtcgatgtttccggctttcaccagttcaatccactgcggtatatggttatgcagcgggcaggtccattcacaaacgctgtgctcgccgcacttaaggcagcgcgaggcttcccgttgtgcctggtcggcgcgaaatggcagataaatttcatcaaaaccggttttgcgcgcttcaatcgccagtttatccggctcgccacgcgcgggcgttgcctgcatttgttcgactttactcattaccggcatttcttgcgccgcggtactggcatgccacggttgatgttcctgacgcgcggtgcgcaagcggcgggatttcgccatgccggagagtgcgacgtcagtgaccagttgcagcgcgtccgccgggcaattctcaacacaggcaggaccgttttcgcgccccgcacaaaggtcgcatttatgcgccgtggcttttacttttcctgccgcgacgggtgtcaggacgatttgcatcgtaccaaaaggacaggccaccacgcaggatttacagccaatacacttttgctgattgacctgaatgctgtcatcaacgtggctgattgcgccattagggcagctacgggcgcagggcgcatcttcacaatggtgacaggtcactgcactacgttgctgttgatgtttgataaccgtaattcggggatgaaaatggtgttggctcaggacatgttgctcatcattgtgagccatgacacaggcgatttcacaagcatgacaacccagacattgctgactgttggccataataaaacgattcataacgaccttcttttttggttgtaaaaaccttattctttatatgagtgttgttattacccgacttacaggggaatcggcaatgttcatgtgcccagaataagtaactatttcgctataaactgtggcagatcaaataatcccatcactgactaaattgcgtttcagcgaactggaacattaatgattttttgtggagaagacgcgtgtgattgttaaacgacccgtctcggccagtctggcccgggcctttttttacattgtgctgctgtcgattctttccacgggtatcgctctgctaactctggcgagcagtttgcgcgacgctgaggctatcaatattgccggatcgctgcgtatgcagagttaccgcctgggctacgacttgcaaagtggcagtccacaactcaatgcacatcgccagttatttcagcaggcactgcattcaccggtattaaccaacctcaacgtctggtatgtgccagaagcagtaaaaactcgctatgcgcatctgaatgccaactggctggagatgaataatcggctcagcaagggcgatttgccgtggtatcaggccaatattaataattatgttaatcagatagacctgttcgtactggctttacagcactacgctgaacgcaaaatgctgctggtggtggcgatttccctggctggcggcatcggtattttcacgctggtcttttttactttgcgccgcatacgccatcaggtggttgccccgctgaatcagctggttaccgccagtcagcgtattgaacacgggcagttcgactcgccgccgctggataccaacctgccgaatgagcttggtctgcttgcaaaaacctttaaccagatgtcgagcgagctgcataaattgtaccgttcgctggaagcgtcagtagaagaaaagacccgcgatctccacgaggccaagcgtcgtctggaggtgttgtatcagtgttcgcaggcgctgaacactagccagattgatgtgcattgtttccgccatattttgcagattgttcgcgacaatgaagcggctgaatatctggagttaaatgtcggtgaaaactggcggattagcgaagggcaaccaaacccggaattgccgatgcagattttaccggtgacaatgcaagagacggtttacggcgaactgcactggcaaaatagtcacgtttcatcatcagaaccgctgcttaacagcgtttcgtcgatgctgggacgcggtttgtactttaatcaggcgcagaagcattttcagcaattattgttgatggaagaacgtgcgaccatcgcccgcgaattgcacgactcgctggctcaggtactttcttacttacgtatccagttgacgttactgaagcgttcgataccggaagataacgccaccgcacaaagtatcatggccgatttttcccaggcgttgaatgatgcttatcggcagttacgcgagctgttgactactttccgcctgacgctgcagcaggcggatctcccctccgcattgagggaaatgctggatacgttacaaaatcaaaccagcgccaaactgaccctcgactgccgtctgccaaccctggcactggatgcgcaaatgcaggtgcatttgttgcaaattattcgcgaagcggtgctgaatgcgatgaagcacgccaacgccagcgaaatcgccgtcagttgcgtcaccgcgccggacggcaatcacacggtttatatccgtgataacgggattggtatcggtgaaccgaaagaacccgaaggtcattatggtctgaatatcatgcgcgaacgcgcggaacggctaggtgggacgctgactttttcacaaccttccggcggcggcacgttagtgagtattagctttcgctctgcggagggtgaggaaagtcagttaatgtaatgcctcctactgaccaaagaatacttgcacttaaggttcagtataaaagggcatgataatttacattaactcctttttttctccacgattggctcgtaccttgccgctacagtgaagcaagtcaagcctacaacgatacgcagaaacacgaggtcctcttttaatggcgaatttctttattgatcgccccatttttgcctgggtgctggcaatcctgttgtgtctgacaggtaccctggcgattttttcattgcccgttgaacaataccccgatctcgcgccaccgaatgtgcgagtgaccgctaactatcccggcgcatcggcccagacgctggaaaacaccgtgacccaggttatcgagcaaaatatgaccggcctcgataatctcatgtatatgtcatctcagagcagtggcaccggtcaggcatctgtcactttaagttttaaagcaggcaccgatccggacgaagccgtgcagcaagtacaaaaccagctgcaatcagccatgcgaaagttaccgcaggcggtgcaaaatcagggcgtgacggtgcgtaaaaccggcgataccaacattctgaccattgccttcgtctctaccgatggttcgatggataaacaggatattgctgattatgttgccagtaatattcaggacccgttaagccgcgtgaatggcgtcggggatatcgatgcctatggttcgcaatattccatgcgtatctggctggacccggcgaaactcaacagtttccagatgacggctaaagatgtcactgatgccattgagtcacagaacgcgcagattgcggttgggcaacttggtggtacaccttccgtcgataagcaggcgctcaacgccaccattaacgcccagtcactgctgcaaacaccagaacagttccgcgatatcaccttgcgggtcaatcaggacggctcagaggtaaggctgggcgatgtcgccaccgtcgaaatgggggcggagaaatacgattatcttagccgcttcaatggtaagccagcctccgggctgggggtaaaactggcctccggcgctaacgaaatggcgacagcggagctggtgctcaatcgtctcgacgagctggcgcagtatttcccgcatggactggaatacaaggtggcgtatgaaaccacctcgtttgttaaagcctccattgaagacgtggtgaaaacgctgctggaagctatcgctctggttttcctcgttatgtatctgttcctgcaaaacttccgcgccacgctgatacccactatcgccgtgccggtggtgttgatgggaaccttctccgtactttacgccttcggttacagcgtcaacaccttaaccatgttcgcgatggtgctggcgatcggtctgctggtggatgacgccatcgtggtggtggaaaacgtcgaacgtattatgagtgaggaaggactcactcctcgcgaagccacacgtaaatcgatggggcagatccagggggcactggtcgggattgcgatggttctttcggcggtatttgtaccaatggccttcttcggcggcaccaccggtgccatctatcgccagttctctattaccattgttgcggcgatggtgctgtcagtactggtagcgatgatcctcactccggctctgtgtgccacactacttaagccactgaaaaaaggtgagcatcatgggcaaaaaggcttttttgcctggtttaaccagatgtttaaccgcaacgccgaacgctacgaaaaaggggtggcgaaaattctccaccgtagcctgcgctggattgtgatttatgtcctgctgcttggcggcatggtgttcctgttcctgcgtttgccgacgtcgttcttaccgctggaagaccgtggcatgtttactacctcggtacagttgcccagcggttcaacgcaacaacagaccctgaaagtcgttgagcaaatcgagaaatactacttcacccatgaaaaagacaacatcatgtcggtgtttgccaccgttggttctggccctgggggtaacgggcaaaacgtggcgcgaatgtttatccgcctgaaagactggagcgaacgcgacagtaagaccggcacctcgtttgccattatcgagcgtgcaacgaaggcgtttaaccaaattaaagaagctcgcgttatcgccagcagcccgccagcaattagcggtcttggtagttctgcaggttttgatatggagttgcaggaccacgctggagcgggtcacgatgcgctgatggcagcacgtaatcagttgctggcgctggcggcggaaaacccggagctaacccgtgtgcgccataacggcctcgacgacagtccgcagttgcagattgatatcgaccagcgtaaagctcaggcgctgggcgttgctatcgacgatattaacgacacactgcaaaccgcctggggttcgagctatgtgaatgactttatggatcgcggtcgcgtgaagaaagtctatgtgcaggcagctgcgccgtatcgcatgctgccagatgacatcaatctctggtatgtccgaaataaagatggcggcatggtgcccttctctgctttcgcgacctcacgctgggaaacaggctcgccgcgtctggaacgctataacggttattctgcggttgagattgttggggaagccgcaccgggggtcagtaccggtacggcgatggatattatggaatcgttagtgaagcagctgccaaacggctttggtctggagtggacggcgatgtcgtatcaggagcggctttccggcgcgcaggctccggcgctgtacgccatttccttgctggtggtattcctgtgtctggctgcgttgtatgaaagctggtcggtgccgttctcggtaatgctggtcgtgccgctgggggtaatcggcgcgctgctggcaacctggatgcgcgggctggaaaacgacgtttacttccaggtgggcctgttaacggtcattggtttatcggcgaaaaacgccatcctgatcgtcgagtttgctaacgagatgaaccaaaaaggccacgacctgtttgaagcgacgctccacgcctgccgtcagcgtttacgcccgattctgatgacctcgctggcatttatcttcggcgtattgccaatggcaaccagcacgggtgccggttccggtggtcagcatgcggtgggtactggcgtaatgggcgggatgatttcggccactattctggctatttacttcgtgccgctgttctttgtgctggtgcgccgccgcttcccgctgaagccgcgcccggaataagcaataaaaaaggcgacatgccaatgtgtcgcctttttcaactttccgattaagaacctgctcagcgggttcttgctgtttgtactttgtctcaggaattacttacgaagcataacttcgataaagtctttccagttccccagttcacgttcaatcataacaacctctcttataattatgggtattctacggaaacaatataccgtggtgaagctaatttactcgattgctgcgatgactacctccgggggacaaatcttatgtaaatactatggtcctgcggtgatgatttgtatgtgatacacagcaacatttcgagatattcatacggcatctaatactgatttaattctggttaaaatacagacagataacaagatgaatattcttaatgtttacgttaaaaatgtttaatattatttaatagttgttaatttgaatacttcgataatgttatatttcctgataatcatttgcaggcaaaatgttttcacccttaaatgagtatttattctcataaatcgaaaaaggattcattatggttacactttacggtatcaaaaattgtgacaccattaaaaaggctcgccgttggctggaagccaataacatcgactatcgttttcatgattaccgcgtcgatgggctggacagcgaattattgaacgattttatcaacgaattaggctgggaagcgttactcaacacccgtggtacaacctggcgtaaactggacgaaaccacccgcaataaaatcaccgatgcggcctctgcggcggcattaatgactgaaatgcctgcaattatcaaacgtccattgctctgcgtgcccggtaagcctatgctgctgggtttcagtgattccagttatcagcaatttttccatgaggtgtagtctatgtcgtgcccggttattgagctgacacaacagcttattcgccgcccttccctgagtcctgatgatgcaggatgccaggctttgttgattgaacgtttgcaggcgatcggttttaccgttgaacgcatggactttgccgatacgcagaatttttgggcatggcgtgggcagggtgaaacgttagcctttgccgggcataccgacgtggtgccgcctggcgacgccgatcgttggatcaatcccccgtttgaacccaccattcgtgacggcatgttattcgggcgcggtgcggcagatatgaaaggctcgctggcggcgatggtggtggcggcagaacgttttgtcgcacaacatcccaaccatacggggcgactggcatttctgatcacctctgatgaagaagccagtgcccacaacggtacggtaaaagtcgtcgaagcgttaatggcacgtaatgagcgtctcgattactgcctggttggcgaaccgtcgagtatcgaagtggtaggtgatgtggtgaaaaatggtcgtcgcggatcattaacctgcaaccttaccattcatggcgttcaggggcatgttgcctacccacatctggctgacaatccggtacatcgcgcagcacctttccttaatgaattagtggctattgagtgggatcagggcaatgaattcttcccggcgaccagtatgcagattgccaatattcaggcgggaacgggcagtaacaacgttattccgggtgaactgtttgtgcagtttaacttccgcttcagcaccgaactgactgatgagatgatcaaagcgcaggtgcttgccctgcttgaaaaacatcaactgcgctatacggtggattggtggctttccgggcagccatttttgaccgcgcgcggtaaactggtggatgcggtcgttaacgcggttgagcactataatgaaattaaaccgcagctactgaccacaggcggaacgtccgacgggcgctttattgcccgcatgggggcgcaggtggtggaactcgggccggtcaatgccactattcataaaattaatgaatgtgtgaacgctgccgacctgcagctacttgcccgtatgtatcaacgtatcatggaacagctcgtcgcctgatgagtggttctgcaagaggaaataagcatggactggctggctaaatattggtggattctggtgattgtctttttggtaggcgtcctgctgaacgtgattaaagatctcaagcgcgtcgaccataagaaatttctcgccaacaagccggagcttcccccgcatcgtgatttcaacgataagtgggacgatgacgacgactggccgaaaaaggatcaaccgaagaagtaagctgagtgctcaaccgtaggccggataaggcgttaacgccgcatccggcaatggtgaacgatgcctgatgcgacgctcacgcgtcttatcaggccaggtaatctgtcttttacatcatttcaatcacatcatcatcgccaggcttaccgccacttagcgcttcgtcgaaataatgtttcggaatggtataacgcaagtgatccagggcaaattgcatactgcgattgtcgatcgcatggcctaaatcctccacgatatccagcgtcacgtcaccaccggcactgattaacgcttcctgcgccgcaaccgcatgcgccagatcgataaccggatcttcaccgccatgaatcaggtgaattgtcgtggctgtagacgcagtttccggcaggctcgcatagcgtccgttaaaagcaatgacgcgtgaagcaaggcccggttcggctttaatgctctccagcaccataatcgcgccttgagagaaaccgatgagcgccgtggcgttagcccctactccgctctgtttctgccagtagcgcaccgtttcaataaacgtcggcatgatcgcatccacacgcgcctggcgattatcttccgtaataccctgcaccgaaaaccactgacgccccgccggattaccgctcggctccgcgccaccgacactcaccaccagcgcatcaggaaacagcggtgcaaaccagttgcctatttcccccattgccaccgggttatccccgacaccgtggaaaagcagtaacaactgttgcgcaggtttatccgggctttgaacaacaaaatggtcatgtttcatggcgaactccttaactgatgtcattaattttacgccgctgactcacaatgaccatgagataaaattgaaggagtcagtgaaataattgccattgcgttatgcgatcgcgcagacgctcagtgcgaacatcattaagtgcgaacagcgcctgcgcggcctcttcccgctgacggaccagtaacatcttgcggcctgaaagtttaagtgtggtacataactgcgcatcactggcgtttttctgtaaacgcccacgcagcgccggtaatgccagttcactggtttgtaacagacgcaataagcaacctaacgacgttaatagcggacgatgagcgaaagcaaaaccggccagttcaagccagtcgtcgtcagaaaggacggcatcgtttagtggatcaacaggaagcgtttcgccattccactgcgcgagagcttgcgcatcgcgacgtaaacggtaatgctcacgttcagccagctgtttacccgcatcactcatcggtaacagcgccatcgccgtatagcaaccgctgctggcttcccgatgattacccatccgcaccagcacaaaaccgcagcgttgccagaaacgccataactccccggtgtaaccaaaactcaccgaaagatagtcgaggtcttgcgtatattgcaaagcaccagcaataagttgccgccctgtgccttcccgctgacgagccggatgaactgctatccggctgacccgccgtccacgcaatgtcgccgccagtggattgttgccgtgcgccgccagcgactgggccaccagattaccccgcgggcgacgaaaacctgcccataccgcctgactgagttgttgagataatccaccctcatccaccagccacagcgccccggcaatctcgttttcgccagccgcctgtaaaaaatgttgccctggtgcatccatcatccggcgtaaatccagcggcgaagtccgatagtgcgcaccagacaagagctgataaacctttaacggcgtttctggatcgctttgccataacgtctgttcaaatgcggaaatgacaatattgccttgtggtgtatgggtgaagttttcatcgtcaaaaaccagtgcctcgctgaccattttttccagcgggcatccctgcgcccagcggatcggctgttgcagttcaaaacggtgtaaatgcggaaagcgagcgcaaaatttcagcaaaaaaccacgtccggtgccttcgtagccctgcaccgtagtggttaacaacgttcgaggaaaacgcgataccagttgatgcaacaatggcgcaggtatggctgcggcttcatcgaccaccagccagtcggcttgctcatcgctggctaacaaggcatccggcgcaataaagcgaaacttctcgcccgcaaattgtgccagtacatccgttgacgcttttgcgggcgcggtgacaatcgctctgcccgcaatacgagaaatgagttgccctgccaacgccgacttaccgcgcccacgcgcagccgttaccgctgccacgcccggcggcatggtcattagctgctttaagagttgctgttgttctggttgtggtgcgccagtcgcggggtaccagtcagtacggggagtaaaatgcgccaacgagaatggctggttttgccgccagaggatagcctcgttatccgccgtaagtacgcgtttgagatgctggacaaaatgcggcgtcgcaatagggtcagggcaatcactccagcgcagcgagtcggcatcaggttggttttcccactcttcccatacagggagtaacaaaaccagccagcttcccgctttcaacgttccgctaagtgcggcaaaggcagcggcatcaaagccgtggcgggcgtcgaataccgcatgccggaactcgcgcccaagtaaagtttgtagtgccgagggagaacagtggttttcagcatctggccgcggcgaaatccacagccagtcgccaggtaaggcatcacgcaacttaagagtatgctcaaaacaccaaccctcttccccgctcaacaccagcaagcggcggatcccttcacgtttcatttgcgctgttaatgtgtgaagcgcagtcagttcagccatccctgccccggaagttaaatgcttttaccaaaagtattgcattgtgccggatcgccgctgtcgaaaccacgtttaaaccagctgtagcgttgctgagaagtgccatgagtgaaactgtctggtactactcgcccctgactttgctgttgtaaacggtcatcgccgatggcctgcgccgcgttcagcgcctcttccagatcgccggtttccagaacgccttgctgctgcatactatgcccccagacaccggcaaaacagtcggcctggagttccatacgcacagataagcggtttacttccgcctgcgtcgcgttttgttgcagttgacgaactttcggctcgatgcctaacagtttctgcacatgatgaccgacttcatgggcgataacgtacccctgggcaaaatcgccatccgcgccaagtttgtctttcatgtcatcatagaaggagagatcgatataaaccgtgccatccgccgggcaatagaacggccccattatggactggcccgccccgcagccggtacgcgtcattccacggtacatgaccagcttcggttgctgataggtcttacccatcttctcgaactgttgtccccaggtgtcttccgtggttgccagaatcaccgaggtgaattttgcggcttcgtcttcatttgggctaattgaccgcgttgattgttgttgggaaaccggctgcccggtcatcaacccggttaaatcaacaccatagtagcctgcaaccagcacgactatcagtaaaatcagcccgcctttaccgcttggcaggcgaaaaccgggaccgcccatagatggaccaccagagctgttgcgcctgtcttcaacattgtcactttcacgtcgcccttgccaacgcatagatacctcaacaatatattcattatagaaatgatcgtaggtggttcagaggaagattaccacaggaaagcgggatgaaatggcggaggaatgagcgttcaatgcatatattccgagagcggttgtcttgccgtgccagctgcacggcaagatgatgaacagaaaaatcagtccagctgtacacccaggcggcgggcgacggcttcataggcttcgatcaggccaccgaggctctggcggaaacggtctttgtccattttctccagcgtttctttgtcccacaggcggctaccgtccggggagaactcatcacccagtaccacttcgcctttgtacagaccaaattccagcttgaagtcgaccagaatcagaccagcatcatcgaacagttttttcagcacgtcgttcgctttgtaggtcagctctttcatacgcgccaggttctctttgctcacccagccaaaggtttcgcagtaagattcgttgaccatcggatcgtgcatggcgtcgtttttcaggaacagatcgaacagcggcgggttcagctcaataccttcttcgattccaagacgtttcaccagagagccagcagcacggttacgcacgacacactcaaccggcaccatatccagctttttcaccagacattcggtatcggagagcagacgctccatttgagtcgggatacccgcttcagccagtttgctcataatgaagtagttgaacttgttgttcaccatacctttgcgatcaaactgctcaatgcgcgcgccatcccctgctgacgtatcattgcggaattcgagcaccaacaggtccgggttttccgtgctgtatacggttttcgctttaccacgatacaactcagcttgcttttgcatctttatcactcctgggtgtgaattaacgttttaaaatcttttgctgtctggtgtgccggatgttttgtcggatgcggcgtgaacgccttatccgaactacgtccgacaaacaaatttcgtgcgaattaccgctaaaatcgcgttttcctgcagacgcacacgtttgcgtatcatatcagaaaaaagggccggatgattccagccctgtatttttacttgctaaacgcagcctggaagacagctaccagcgcgtcgttctgactctgagtcagagtatgacctttcggatcgatgaactgtaggctgctgcggttatctaaatcgccaacctgcagtttatagtcaccggatgccaggcctggatcgctcgcgcccagttcctgccagtcgctgtcagacagcggcttataagttacggccatgttgccctgcgaacgggtgctgtcggtcactttcatgcccactttttccagcgccgctggcagacgttgccaaaccacattgaacggcccgcgtacgaccagcattggtaaaccggtgtcatcagctgcactttgtacgtccatagtggtggaggcacgattttgcgcagcgttcgcggcgtcagtggcagatttatccagaccggcggaaataacgttcatcatctccgtgctgtaacgctgcatggaagccgcgtctgcaaccggtttgcccgcctgttccaggttcagcagtttaaccgtaaccgcctgctgataaccctgcggcttaacagagatttgataacgaccacgatactgctcgtcttcgtccagacggttccattgtacccaatcggtggtcagtgtctgaccagcatcatcacgttgggtgatggtgtagtttttcgcctgcagcacgctaaccacctgcggccacagagtattgccacgaccattttccaccagcaatgaagcggtatcgcccgtgaactgggtacgcgcgccagaaaccagtgccagcggctgggctggtggacgaatgtccagcgccttaccgacagcaccactaccgttggtcaccgggattgcataatcaccggaggtcaccggcaaaatcattccagccggggcatgaagctccgcaagcggtgccgcttccaggtaggcttcatcaccactgacctgacgcttatagcgtgagtcagaactacaggcagcgagtaataaaacaagcgaaacacccgcaacctttgccaggcgcgacttttgaacagagtaagccatcaaatctccctaaactttacagcaaaccggcatgcttaagcgccgctctgaccgtctcacgaccactgtcggtgattggtgtcattggcaggcgcagcgtatcggtcgccacaagacccagttccttacatgcccatttcaccgggattggattgggttcgacaaatagtttgttgtgtaatggcatcagacgctgattaataacgcgtgcctcggcaaaatgcccttctgctgccagtttgcacatctgggccatatcacgcgctgcgacgttagccgtaacggaaataaccccatgaccgcccaattgcatgaagtccagcgcgctcgcatcatcgccgctcagcagaacaaaatcatctgaaaccagctctttgatctggtttacacgcgttaagttccctgttgcctctttgattccgataatattttttactttcgccagacggcccaccgtttccgggagcagatcgcagccagtacgggacggcacattatacagaatttgcggcaggtcagtatgctcagcgatggctttgaaatgctgatacaaaccttcttgcgacggacgattgtagtaaggggttaccgtcaggcagccgacgataccactgtcattgaagcgctgcgtcaggctaatggcttccgcagtagcgttagcgccggtcccggcaattaccggaatgcgcccatcagccagatccagcgtcatcatcaccacatcagcatgttcgtcatgatttaaggtagcggactcgccagtggtgccaacagaaacgatcgccgaagtaccgctggcgacatgataatcaatcagttttttcaagctagcccgacagacattacctttttcatccatcggagtaacaatcgcgacaatacttcccgtgaacatgggccatcctctgtgcaaacaagtgtctcaatggtacgtttggtatggcattaaaagcaagcagacagaaccgttctgattgttgtatgcatgttttttttatgctttccttaagaacaactcaccccttaaaggaataaccagtttgacactgtcatcgcaacattatctggtgatcactgcgttgggtgccgatcgccctggaattgtgaacaccatcacccgtcatgtcagtagttgcggctgtaatattgaagacagtcgcctggcgatgctgggagaagagttcacgtttattatgctgctttccggttcatggaatgccattactctgattgaatcaacgttaccgttgaaaggtgccgaactggatcttttaatcgtgatgaagcgcacgacggcgcgtccgcgtccgccaatgccagcatctgtctgggttcaggtcgatgtggcagactccccgcatttaattgaacgcttcacagcacttttcgacgcgcatcatatgaacattgcggagctggtgtcgcgcacgcaacctgctgaaaatgaacgggctgcgcagttgcatattcagataaccgcccacagccccgcatctgcggacgcagcaaatattgagcaagcgttcaaagccctatgtacagaactcaatgcacaaggcagtattaacgtcgtcaattattcccaacatgatgaacaggatggagttaagtaatgaatccactgaaagccggtgatatcgcaccgaaatttagcttgccggatcaagacggagaacaagttaatttgaccgacttccagggacagcgtgttctggtttatttctacccgaaagccatgacccccggctgtaccgtacaggcctgcggcttacgcgataacatggatgagttgaaaaaagcgggcgttgatgtgctgggtatcagcaccgataaacccgaaaaactctcccgttttgcggaaaaagagctgcttaactttacgctcctgtctgatgaggaccaccaggtgtgcgaacaattcggcgtctggggtgaaaagtccttcatgggcaaaacctacgatggcattcatcgcatcagcttcctgattgacgctgatggcaaaatcgaacatgtctttgacgatttcaaaaccagcaatcaccacgacgttgtgctgaactggctgaaagaacacgcctgattactttgctccattccgtgctggctgcgcttgcggccagcatacctcacttctcgtgatcaagatcacattctcgctttcccctgcgacacgggtgtcgaatccattttttgctgaacgttaatgaccatcatttttgtaccgttcagaatccagttaatacataacttattgaatatattgagttaatcagaatggcatcctttatgcaatatgaaatgcaatgtttcatatcattttcaaggagccgacatgaaccgctttgtggtggccgaaccactgtggtgtacaggatgtaatacctgtctcgctgcctgttcggacgtgcataaaacgcaaggtttacagcaacacccgcgcctggccctggcgaagacgtcaacaatcactgcccctgtcgtgtgtcatcactgtgaggaagccccttgcctgcaggtctgcccggtcaatgccatctctcagagggatgatgcgatccaactcaacgaaagcctctgtattggctgcaagctttgcgccgtggtctgcccatttggcgcaatcagcgcttcaggaagccgtccggtgaatgcccatgcgcaatatgtttttcaggctgaaggctcactcaaagacggcgaagaaaacgcgccaacacaacatgctttgctgcgctgggaacctggtgtccagaccgtcgcggtgaaatgcgacctgtgtgatttcttgccagaaggtccggcctgcgttcgcgcttgcccgaatcaggcgttacggctgatcaccggtgatagcctgcaacgtcagatgaaagaaaaacagcgccttgccgcaagctggtttgccaatggcggggaggatcccctttccctcactcaggagcaacgctaatggatgccctgcaattattaacctggtcgctgattctctatctgtttgctagtctggcttcgctgtttttactcggtctggacagactggctattaagctttccggcatcacatcgctggtgggcggcgtgattggcatcatcagcggaattacgcaattacatgctggtgtaactttagtcgcccgttttgcccccccttttgaatttgccgatttaaccctgcgaatggatagcctctcggcatttatggtgctggttatctccttgctggtggtggtttgttctctctattcattgacttatatgcgcgaatacgagggcaaaggcgcggcggcgatgggcttctttatgaatattttcatcgcatcgatggttgccctgctggtgatggacaacgctttttggttcatcgtgctgtttgaaatgatgtcgctgtcttcctggtttctggtcattgccaggcaggataaaacgtcgatcaacgctggcatgctctacttttttatcgcccacgccggatcggtgctgataatgatcgccttcttgctgatggggcgcgaaagcggcagcctcgattttgccagtttccgcacgctttcactttctccggggctggcgtcggcggtgttcctgctggcctttttcggttttggcgcgaaagccgggatgatgccgttgcacagctggttgccgcgcgctcaccctgccgcaccatcgcacgcttcggcgttgatgtctggcgtaatggtcaaaataggtattttcggcatcctgaaagtagcgatggatctgctggcgcaaacgggtttgcctctgtggtggggcattctggtgatggcgatcggcgcaatctccgcgctcctgggcgtgctatatgcgctggcggaacaggatatcaaacggctgctggcctggagtaccgtcgaaaacgtcggcattattttgctggcagtcggtgtggcgatggtcggtctgtcactgcacgacccgctgctcaccgtggttggactgctcggcgcactgtttcatctgctcaaccatgcgctgttcaaagggctgctatttctcggcgcgggagcgattatttcgcgtttgcatacccacgacatggaaaaaatgggggcactagcgaaacggatgccgtggacagccgcagcatgcctgattggttgcctcgcgatatcagccattcctccgctgaatggttttatcagcgaatggtacacctggcagtcgctgttctcactaagtcgtgtggaagccgtagcgctacaacttgcgggtcctattgctatggtaatgctggcagtcactggtgggctggcagtaatgtgcttcgtaaaaatgtacggtattactttctgtggtgcgccgcgcagtacacacgctgaagaggcacaggaagtgccaaatacgatgatcgtcgccatgctactgctcgcggcactctgcgtattaattgcgcttagtgccagttggctggcaccgaagataatgcatattgcccatgcgtttaccaatacccctcccgccactgtcgccagcggaatagcacttgtacccggcacgtttcatacacaggtcaccccctcattactgttgctgttactactggcgatgcctttgctgcctggcctttactggctgtggtgtcgttcgcgccgcgcagcgtttcgtcgcacaggagatgcctgggcatgcggctacggctgggaaaatgcgatggccccgtcaggcaatggcgtgatgcagccgctgcgtgtggtcttttctgcgctatttcgtctacgacaacagctcgaccctacgctgaggctaaataaaggtcttgcgcacgtcaccgccagggctcagagcacagaacccttctgggatgagcgggtgatccgccccatcgtgagcgccacccaacggctggccaaagaaatacagcatctgcaaagcggcgactttcgtctctattgcctgtatgtggtcgccgcactggttgtgctgctaatcgctattgccgtctaaggaaatcaccatgagacaaactctttgcgacggatatctggtcatttttgcgttagcacaggccgtgattctgctgatgctaaccccactttttacgggtatttcccggcagatacgcgcgcgtatgcactcccgccgcgggccggggatctggcaggattatcgcgatatccacaaactgtttaaacgccaggaagttgcgccgacatcttcaggtctgatgttccgcctgatgccgtgggtattaatcagcagcatgctggtgctggcgatggccttaccactgtttattaccgtttccccttttgcgggcggcggcgatctgatcacccttatctatcttcttgccctgtttcgttttttctttgctctttccgggctggataccggaagtccgtttgcgggagtcggtgccagtcgcgagttgacgctcggcattctggtcgaaccaatgcttattctctcactgctggtattggcgctgatagcaggttccacgcatatcgagatgatcagcaatacgctggcgatgggctggaactcgccgctaaccaccgtactggcgttactggcctgtggttttgcctgcttcattgagatgggaaaaattccctttgatgttgctgaagcagaacaggaattacaggaaggcccgctgaccgaatattccggtgccgggctggcgctagcgaaatgggggctggggctgaaacaggtcgtgatggcatcactgtttgtggccctgtttctgccctttgggcgcgcgcaagaactttctctcgcctgcctgctgacttcacttgtcgttacgctgctcaaggttttgctgatttttgtactggcctcaatcgcagaaaacacgctggcacgcgggcgttttttactcattcaccatgtgacctggcttggcttcagccttgctgcgcttgcatgggtcttctggttaaccggtctgtaaggagcactgacggaatatggaaaatcttgctctgacgacgttattgctgccttttatcggcgcactggtcgtttcgttttcgccacaacgtcgggccgccgaatggggggttttgttcgccgcgctgaccacgctgtgcatgttgtcactgatctccgcgttttatcaggccgataaagttgccgtcacgttgacgttggtcaacgtgggggatgtggcgttgtttggcctggtcattgatcgcgtgagtacgctgattctgtttgtggtggtgtttctcggtttgctggtcacgatctactccacgggttatctgacggataaaaatcgcgaacacccgcataacggcacgaatcgttattacgcatttttactggtgtttatcggcgcgatggcgggactggtactctcctcgacgctgctcggtcagttgttgttttttgaaattacaggcggctgctcctgggcgttgatcagttattaccagagcgataaagcgcagcgttcagcactaaaagcgttacttatcactcatatcggctcgttggggttgtatcttgccgccgccacgctgtttttgcagaccggaacgtttgcgcttagcgcgatgagcgagttacacggcgacgcacgttatctggtttatggcggcatcctgtttgccgcgtgggggaaatcggcccagctaccgatgcaagcgtggctaccggacgcaatggaagcgccaacaccgatcagcgcctatctccacgccgcatcgatggtgaaagtgggcgtttacatttttgcccgcgctattatcgacggcggcaatatcccgcatgtgattggcggcgttggcatggtcatggcactggtcaccattctttatggctttctgatgtatttgccacagcaggatatgaagcggttgctagcctggtcgaccatcactcaacttggctggatgttcttcggcttgtcgctctccatcttcggctcgcggctggcgctggagggcagcatcgcctacatcgtcaaccacgcgttcgctaaaagcctgtttttccttgtagcaggtgcgctgagttacagctgcggcacgcgcttgttgccgcgtctgcgtggcgtattgcacaccctgccgttgccaggcgtgggtttctgcgtggcagcgctggcgattaccggcgtgccgccgttcaacggcttcttcagtaaattcccgctgtttgctgccggttttgcgttgtcagtggagtactggatcctgctgcccgccatgattcttctgatgattgaatcggtcgccagtttcgcctggtttattcgctggtttggtcgcgttgtgcctggcaaaccgagcgaggccgtcgccgatgccgcaccgctgccaggatcaatgcgcctggtgttgattgtactgattgtgatgtcgctgatttccagcgtaatcgccgcgacctggttgcagtaaggagatgatgaatgaccggttctatgatcgtaaataatctggcgggactgatgatgctgacatcgctgtttgtgattagcgtcaaaagctatcgcctgtcatgcggattttacgcctgccagtcactggtgctggtgtctattttcgccactctctcgtgcctgttcgccgcagagcaactgctgatctggtccgccagcgcctttatcaccaaagtgctgctggtaccgttaatcatgacttacgctgcacgaaatattccccagaacatcccggaaaaagcgttattcggtccggcaatgatggcactgctcgcggcgttaattgtcctgctttgcgcatttgtcgttcagcccgtgaagctaccgatggctaccgggctgaaaccggcgctggcggtagcgttaggtcattttctgcttggcctgctgtgcattgtcagccagcgcaatatcctgcggcaaatttttggttactgcctgatggaaaacggctcccatctggtgctggcgcttcttgcctggcgagcaccggaactggtggaaataggtatcgctaccgacgccatcttcgccgtcattgtgatggtgttactggcaagaaaaatatggcgtacccacggcacgctggacgtgaacaacttgaccgcgctgaagggataatgagatgagttattctgtgatgttcgctttactcctgctcacgccgctgcttttttcgctgctctgttttgcctgccggaaacggagactttctgcgactcgcacggtgaccgtattacatagcttagggatcacactgctgctgattctggcactctgggtggtccaaactgccgctgatgcaggagaaatattcgctgcgggactgtggcttcatattgatggtctgggcggtttgttcctcgccattcttggtgtgattggctttctcaccggtatttactcgattggctacatgcgtcatgaagtggcacacggcgagctttcacccgttacgctgtgcgattactacggtttcttccatctgtttttgttcaccatgctgctggttgttaccagcaataacctgattgtgatgtgggcggcgatcgaagccaccaccttaagctcggcgtttctggtaggcatttacggtcagcgttcatcgctggaagctgcatggaagtacatcattatttgtactgttggtgtcgcttttggtctgttcggtaccgtgctggtatacgccaacgccgccagcgttatgccgcaggcagaaatggcgatattctggagcgaggttcttaagcaatcgtccttgcttgacccaacattaatgctgttggcctttgtgtttttgctaattggctttggtaccaaaaccgggctatttcccatgcacgcctggctgccggatgctcacagtgaagcgccgagtccggtcagcgccctgctctccgccgtattgctgaactgcgcgctgttggtgctgattcgctattacatcattatttgccaagccatcggcagcgatttccccaaccggttgttgctcatcttcggcatgttgtcggttgccgtggcggcatttttcattctggtacagcgggacattaagcgtctgctggcgtactccagcgtggagaacatggggctggtcgcggtggagctaggcattggcgggccgctgggaatttttgccgcgctgctgcacatcttaaaccacagtctggcaaaaacgctgctgttctgcggttccggcaatgtactgctcaagtacggcacgcgcgatctcaacgtcgtctgtgggatgctcaaaatcatgccatttaccgccgtgctgtttggcggcggtgcgctggcgctggcagggatgccgcccttcaacatttttcttagcgaatttatgaccattaccgccggactggcacgtaatcacctgctgattatcgtcctgctgttattgctgttaacgctggtgctggcgggcctggtacggatggctgcgcgggtgttaatggcgaaaccgccgcaggccgttaaccggggtgatctcggctggttgaccacctcgccaatggtgattctgctggtcatgatgctggcgatgggaacgcatattccacaacctgtcatcaggatcctggcgggcgcttccactatagtcctctcagggacgcacgatctgcctgcacaacgtagcacctggcatgattttttgccttcaggcaccgcatctgtttcggagaaacacagtgaacgttaattcatcgtcaaatcgtggcgaagcgattctcgccgccctgaaaacgcagttccccggcgcggtgctggatgaagagcgacaaacgcctgaacaggtcaccattacggtgaaaatcaatctgctgcctgacgttgtacagtatctttattatcaacatgatggctggcttccggtcctgtttggcaacgacgagcggacacttaacggtcattacgcggtttattatgccctttcaatggaaggggccgaaaaatgctggattgtggtgaaggcgctggtcgatgccgacagtcgggagtttccgtcagtcacaccgcgcgtccctgccgcggtctggggcgagcgagaaattcgcgatatgtacgggctgattccggttggcctgccggatcagcgtcgcctggtgttgcccgatgactggccggaagatatgcatccgctgcgcaaagatgcgatggattatcgactgcgccctgaaccgacgactgattccgaaacgtatccgtttatcaatgagggcaacagcgatgcgcgggtgatccctgtcggcccgctgcatatcacctccgatgaaccgggtcacttccgcttgtttgtggatggcgagcaaattgtcgatgctgattaccgcctgttttatgtccatcgcggcatggagaaactggcagaaacgcggatgggctacaacgaagtgaccttcttatcggaccgcgtgtgtgggatttgcggttttgcccacagtgtggcctataccaattcggttgaaaatgcactggggattgaggtgccgcaacgagcacatactattcgctcgattctgctggaagtcgaacggctacacagtcatttgcttaaccttggcctctcctgccatttcgttggttttgataccggctttatgcaatttttccgcgtgcgggaaaagtcgatgacgatggcggaattgctgatcgggtcgcgtaaaacctacggtctgaatctgattggtggtgttcgccgcgatattctcaaagagcaacgtctgcaaacgctgaaactggtgcgcgagatgcgcgccgacgtgtcggagctggtagagatgctgcttgctacgccgaatatggaacaacgcactcagggcattggcattctcgaccgacaaatcgcccgtgatttgcgctttgatcacccctacgccgactacggcaatattccaaaaacactgtttacctttaccggcggcgatgttttctcccgcgtgatggtccgtgtcaaagagacgtttgattcgctggcaatgctggaatttgccctcgacaacatgccggataccccactgctgaccgaaggctttagctataaacctcacgcattcgcgctgggctttgttgaagcgccacgcggtgaagacgtgcactggagcatgctcggtgataaccaaaaattgttccgctggcgctgccgtgccgccacctacgccaactggccggtgttgcgttacatgctgcgcggcaataccgtttctgacgcaccgctgattatcggtagccttgatccctgctactcctgtaccgaccgtgtgacgctggtagatgtgcgcaagcgccagtcaaaaaccgtgccgtataaagagatcgaacgctacggcattgatcgtaaccgttcgccgctgaagtaaggacagaagatgctgaagttactgaaaactattatgcgcgccggaaccgcgacggtgaaatatcccttcgcgccactggaggtcagccctggctttcgcggaaaaccggacctgatgcccagccaatgtattgcctgcggtgcctgcgcctgtgcttgtccggcaaatgcgctgactatccagaccgacgaccagcaaaattcgcgcacctggcagctctatctggggcgttgtatttactgcggacgttgtgaagaagtgtgcccgaccagagccatccagcttaccaataactttgaactgaccgtcaccaataaagccgatctctatacccgcgcgacgttccatctacaacgttgcagccgttgcgaacgcccgtttgccccgcaaaaaaccatcgcactggctgctgaattgttagcacagcaacaaaatgcgccacaaaaccgcgaaatgttgtgggcgcaagcgagcgtctgcccggaatgcaaacaacgcgcgacgctgatcaacgacgatacagatgtactgctggtggctaaggagcagctatgagtccagtgcttacacaacatgtcagccagcccatcacgctggacgagcaaacgcaaaagatgaagcggcatttgctacaggatatccgtcgctcggcttacgtttatcgcgtcgattgcggcggctgcaacgcctgtgaaatcgaaatttttgctgccattacaccagtattcgacgcagaacgttttggcattaaggttgtttcatcaccgcgtcacgccgatattttgttatttactggcgcagtcacccgggcgatgcgtatgcctgcacttcgggcgtatgagtctgcccccgatcataaaatttgtgtttcctacggcgcgtgcggtgtcggcggcggtattttccacgatctctacagcgtctggggcggtagcgacaccattgtccccattgatgtttggatccccggctgcccgccaacaccggccgccaccattcacggtttcgccgtggcgctcggtttgctgcaacagaagattcacgctgtggattatcgcgatcccaccggggtgactatgcaaccgttgtggccgcagatcccgccatcacagcgtatcgccattgagcgagaagcgcggcggctggcgggctatcgtcaggggcgagaaatttgcgatcggctcctgcgccatttaagcgacgatcctacaggaaatcgggttaacacctggttgcgcgatgccgacgatccacgtctcaatagtatcgttcagcaactctttcgcgtactccgggggttacatgactgaagagtgcggggaaattgttttctggacgctgcgaaaaaagtttgtcgccagtagcgacgagatgccggaacacagctctcaggtaatgtattactcgctagctatcggccatcacgttggcgtgattgattgtctgaatgtcgccttccgctgcccactgacggaatacgaagattggcttgcactggtcgaagaggagcaagcccgacgtaagatgctgggggtgatgacttttggtgagattgttattgacgccagccacaccgccctgttgacccgggcattcgcgccactggcggatgacgcgacgtctgtgtggcaggcgcgtagcattcaattcattcatctgttggatgaaattgtgcaggaaccggccatctatctgatggccagaaaaattgcgtgagaaggatttctcattaataaggactgttgatggctatgtcagacgaggcgatgtttgccccgccacaaggaataacaattgaagcggtaaacggaatgctcgcggagcggttagcacagaaacacggcaaggcgtctttattacgcgccttcatcccgctgccgccgccgttcagcccggtacaacttattgaactgcatgttctcaaaagcaacttctattaccgctaccatgatgatggcagcgatgtgacggcaacaacagagtatcagggcgagatggtcgattattcgcgtcacgccgtccttctcggcagtagtggaatggcggagctacgctttattcgcacccacggcagtcgttttacttcccaggattgcacactgtttaactggctggcgcggataatcaccccggttctgcaatcatggctcaatgatgaagaacagcaggtggcgctgcgtttgctggagaaagatcgcgatcatcatcgggtactggttgatattactaatgcagtgctgtcacatcttgatctcgacgatctgatcgctgacgtcgctcgtgagatccatcattttttcggtctggcttcagtcagtatggtactgggcgatcatcgaaagaacgagaagttcagcctgtggtgcagcgatctttctgcctcacattgtgcgtgtctgccacgctgtatgcctggcgaaagtgtattgctgacacaaacgctacaaacccgacaaccgaccttgacgcaccgtgcagatgatctgtttctctggcaacgcgacccgttattactcttacttgcatctaacggctgcgaatctgcgctccttataccgcttacctttggcaaccatacaccgggtgcattgttgctggcgcatacctcttccactctctttagtgaggaaaactgccagctactacaacacatagccgatcgcatcgctattgccgttggcaatgccgatgcctggcgtagcatgaccgatttgcaggaaagtttgcagcaagaaaaccaccagcttagcgagcagctcctttcgaatctgggcatcggtgacattatctatcaaagccaggcaatggaagacctgctccagcaggtagatattgtggcgaagagcgacagtacggtgttgatttgtggtgaaaccggaactggcaaagaggtgatcgccagagcgatccatcaacttagcccgcgacgcgacaagccgctggtcaaaatcaactgcgctgccatccccgccagtcttctggaaagtgagttattcggtcatgacaaaggggcgtttactggtgcgattaatacccatcgtggtcgttttgaaattgccgatggcggcacgttgtttctcgatgaaattggcgatctgccgttagaacttcagcctaaactgctgcgcgtattgcaggagcgggagattgagcgtctcggcgggagtagaacgatcccggtgaatgtcagagtcattgccgccaccaaccgtgatttgtggcaaatggttgaagatcgccagtttcgcagcgatctcttttatcgcctgaatgtcttcccactggaattgccgccgctacgcgaccgtccggaagatatccctcttttagcaaaacatttcacgcaaaaaatggcgcgccatatgaatcgcgcaattgacgccatcccgaccgaggcactacgccagttgatgtcgtgggattggccgggcaacgtgcgcgagctggaaaacgtgattgagcgggcggtactgttgactcgtggtaacagtctgaatttacatctaaatgtccgacaaagccgtttactgccgacgctaaatgaagattcagcgcttcgcagttcaatggcgcagttactgcacccgacgacgccagagaatgacgaagaagaacgtcagcgcattgttcaggtattgcgagaaaccaatggcattgttgccgggccccgtggcgcagcgacgcgattagggatgaagcgcaccacgctgctgtcacgaatgcagcggctggggatctcggttcgcgaggtgttgtaatctgcttttgcaggagtatgcatgagaaacaaactctctttcgacttgcagttgagcgccagaaaagcggcaatcgctgaacggattgccgcccataaaattgcccgcagtaaagtgtcggtctttttaatggcgatgtccgctggcgtgtttatggcgatcggatttactttttacctttccgttatcgccgatgccccgtcttcacaggcattaacccatctggtgggcggcctttgctttacactcggctttattttgctggcggtttgcggcaccagcctgttcacctcgtcggtaatgacggtgatggcaaaaagtcggggcgttattagttggcgaacttggctgattaacgcacttctggtggcctgcggtaatctggcaggtattgcctgtttcagtttgttaatctggttttccgggctggtgatgagtgaaaacgcgatgtggggagtcgcggttttacactgcgccgagggcaaaatgcatcatacatttactgaatctgtcagcctcggcattatgtgcaatctgatggtttgcctggcgctgtggatgagttattgcgggcgttcgttatgcgacaaaatcgtcgccatgattttgcccatcaccctgtttgtcgccagtggctttgagcactgtatcgccaatttgtttgtgattccgttcgccattgccattcgccatttcgcccctccccccttctggcagctggcgcacagtagcgcagacaattttccggcactgacggtcagccattttattaccgccaatctgctcccggtgatgctgggtaatattatcggcggtgcggtgctggtgagtatgtgttatcgggctatttatttacgtcaggaaccctgaaaaatcagcccggcgaaacagttcgtcgggctgaagattattcttgcgcgatttgcccatcgggccaggcatgaatcacggctttgatcagcgtcgccaacggaatggcgaagaatacgccccagaatccccacaaaccaccgaagatcaccaccgataaaataatcaccagcggatgcaggttaaccgcttcggagaacaacaccggcactaacaggttgccgtccagcgcctgaataatcagatacaccgcgaagcagctccagaattcagtacctgcgccaaactggaatagcgccacgccaaccaccggaatggtcaccacaaatgcgccaatgtacggaataagaaccgagaagccgaccagcactgccagcagcagcgaatagttcagcccgaagagcaagaaccccagccaggtggcgatccccaccacgatcatctccagcactttgccgcggatatagttggtgatttgttgattcatctccttccacacctgtcctgccagcccacggttacgcggcagcacccggcgaacggcgttcagcatctgctctttgtctttcagcaggaagaagaccatcaatggcaccagcaccagatagacggctatggtcagcaaaccgaccagcgaggcgagggaaattttcaccaccgaatcgcccatggtcagcatccgactgcgcatattttcggccattgcatcaataatgcccgcgtccattaacgccggatagcggcgcggcaacgtggcggcaaagtcagaaagcttattgagcatccccggcatatcgcggattaagtagatgccctgttgccaggcgataggcagtaccacgaacgccatcagtagcaatataccgacgaaaaccaccaatacaatcgacgtcgcccagcggcgggagcagccaatagattgcagacgcacggttggccattccagcaaataggccagcacaatagccaccagcaacggagcaagcaggccactaaagaaaaagataatgccaaatccggcaactaaaataaccagcaaggcaatcgcttccgggtcgctaaaacggcggcgataccattgcatcaacatttcgagcataaagaccttccctgaacctcaagagcgggattgcgatccgcaattgtatcgaaatgtcacaaaaaagacttcgctttttatgacggattcaggaaactgaaaagtcatttgagtgggctaatcttcgccgttacactcaaaggcggcgcggtgggaacgatatttcacagtatcggtcaaatgactatctccagaaatacaggatagaggttatgttcaggcagttgaaaaaaaacctggttgcaaccctcattgctgctatgaccattggtcaggtagccccggcgtttgccgacagcgcagacaccttgccggatatgggaacctccgcaggaagcacgctttccattggtcaggaaatgcagatgggcgactattatgtccgccagctacgcggcagcgcgccgttaattaatgacccgctgttaacgcaatatattaattcgctggggatgcgtctggtttcgcatgccaattcggttaagacaccgtttcatttttttctgatcaacaacgacgaaattaacgcctttgctttctttggcggcaacgtggtgctgcactctgccctgttccgttattccgataacgaaagtcaactggcttcagttatggcgcacgaaatctcccacgtcacccaacgtcacctggcgcgagcgatggaagatcagcagcgcagcgcgccgctgacctgggtcggcgcgttaggttctattttactggcgatggccagtccgcaggcggggatggcggcgctgaccggtacactggcgggaacgcgtcaggggatgatcagtttcacccagcaaaatgaacaggaagcggaccgcattggtattcaggtgctgcaacgctcgggattcgatccgcaggcgatgccaaccttcctcgaaaaattactcgatcaggcgcgttactcctcgcgcccgccggaaattttattgactcacccgttgccggaaagtcgtctggcagatgcccgcaaccgtgctaatcagatgcgcccgatggtggtgcagtcgtcggaagatttctatctggcgaaagcgcgcacactggggatgtataattccggacgtaaccagctcaccagtgatttgctggatgaatgggcgaaaggaaacgttcgtcagcaacgagcagcacaatatggtcgtgctttacaggcgatggaagccaataaatacgacgaggcgcgtaaaacgctgcaaccgttactggcggcagaacctggcaacgcatggtatctcgatctggctactgatatcgatcttgggcaaaacaaagccaatgaggcgatcaatcgtctgaaaaatgcccgcgatttacgcaccaatccggtgttgcagctcaacctggcgaacgcttatttgcaaggcggtcaaccacaagaagcggccaatattctgaatcgctacacctttaataataaagatgacagcaacggctgggatttgctggcacaggcggaagccgcgctaaataaccgcgatcaggagctggctgcgcgagcagaaggttatgcgctcgccggacgactcgatcaggccatttcgctgttgagtagcgccagttcgcaggtgaaattaggcagcctgcaacaagcgcgttacgatgcgcgcatcgaccagttgcgccagctgcaggaacgctttaagccttataccaagatgtaattcgcattaaaggaagaacaatgaccaaacaggtaaaaatctaccataacccacgctgttcaaagagccgggaaacgctgaacctgctgaaagaaaacggcgtggagccagaagtggtgctctaccttgagacacccgccgatgcggcaacgctgcgcgatttgctgaaaatactggggatgaatagcgcccgtgaattgatgcgccagaaagaggatctttataaagaactgaacctggctgacagttcgcttagcgaagaggcgctgattcaggcaatggtggataatccgaagctgatggagcgcccgattgtggtcgcgaatggcaaagcgcggattggtcgtccaccggagcaggtactggaaatcgtgggttaagatgtgctccatcgctagttgaagcacattgccggatgcgacgcttgccacgtcttatccggcctacgaatactatggattaacttcgcgtagttcggataaggcgttcgcgccgcatccgacaataaacaccttatctacaacttcagaatttctttcacaaacggaatggtcagcttacgttgcgcggtaatcgacgcacgatccaactgatccaacgtcataaatagcgtgcgcatttctctgtcgagccgcttcagcaagaaacgccccacatcttccggcagttcaaaaccacgcaaacgcgcgcgtaactgtagcgcctgcaacttatcttcatcagaaagtggctgcaatttgtagatctgcccccagtcgagtcgcgacgcgagatccggtaatcccagattcaactgccgcggtggacgatcgccggtgatcaacaaccgtgttttgcccgattccagaattcgattgtagagatcgaaaatcgccatctcccacaactcatcgcctgcaatacactcaatgttgtcgatacagaccagcgacaaatgctccataccgtcgagcacttccggaacaaaccaggtgcgtttatccagcgggacatagcccaccgcatcgccacgctgcgacaattccgcgcaagccgcgtgcagcagatggctgcgccccgcgccttcgcgtgcccagagatagatgtaaccgctatgttcctgacgcagcacgttttgcagcgcggccagtaaagaggagttatcccccggccagaaacttgcaaaggtttcgtcgtcaggaagataaagtggcaaagagagctgtgccggtgtgttcagagatacctcaaccaggatttcacaaaatcgcgagaagtttaccacagaatcccatgatgtttgaaccgggcagcaacactgcccggtcggtacattatttgtctgttatatccgcgtcttctgcgtccagcaccacttcttcagggcgcagcacactgatcagtttgaagatcaaacttaagccgataccgacgatggtcgccagcgccataccttttaactccgccgcgccgatgtttaccttcgcgccactgacgccgatgatcaaaatcacggaagtcaggatcaggttctgtgctttgttgtaatccactttcgattcgatcaaaacacgaataccggaagcaccgatgacaccataaagcagcagcgaaacgccgcccatcaccggcaatgggatcatctggatagcggcagccagtttaccgacgcaggaaagcaggatagcgaaaatcgccgccccgccgataacccaggtactgtaaacacgggtgatcgccatcacgccaatgttttctccgtaagtagtatttggcgtagagccaaagaagccggaaatcacggtcgacaagccattagcaaacatcgaacggtgcagacctggatcgcgcagcagatcttttttgacgatattagccgttactaccaggtgccctacgtgttcggcaataaccactaacgccgctggcagaatagtcagaatggcaaaccactcgaagcgcggcgtatagagggttggcagcgcaaaccagtgagcattaataatcggcgtggtatcgacaattcccattgcgaaagagagcgcgtaccccaccagcacgccaattaaaatcgggataattgccaggaaaccacgaaacagcacggaacctaaaaccgtgaccgccagggtggtaatagagatgatgatggttttggagtctggcgtttgcccttcagccgggagtaaacccgccataccggcagctacgcccgccagctccagaccgatgacggcaacgattgcgcccattgccgcaggtggaaacagcacgtccagccagccggtccccgctttcttcacgataaaagaaaccaggcagaacagcacgccgcacataataaagccgcccagcgcgacttcataccctaacggcaacagtaacaataccggtgaaataaaggcaaagctggaaccaagataagccggaattttccctttacagatgaagagatacagcagcgttccaataccgttaaataacagtacagtcgccgggttaatatgaaataagacgggcaccaggacggttgcaccaaacatggcgaacaaatgttgcaaactaagcgggattgtctgtaaaagtggcggtctttcactcaccccgatagcacggcgcgtcatagtattatcctctgtattatgtgttataggcgctttactcaaaaaaaagccgactcttaaagtcggctttaattatttttattctttatttcgtaccaaagattttgtcaccggcatcgccgaggcccggaataatgtatccgtgctcgttcagtccctgatcaatcgatgcggtatacagttcgacgtccgggtgcgctttttccagcgcagcgataccttctggcgcagctaccagcaccagaactttgatgctgctgcagcccgcttttttcagcaggtcgatggtcgcgataacggaaccaccggttgccagcattgggtcaacgatcagcgccatacgctcatcgatgttagaaaccagtttctggaagtacggtaccggctccagcgtttcttcattacggtacataccgacaacgctgatgcgcgcgctcggaacgttttccagcacaccgtccatcataccaagacccgcacgcagaattggcacaacggtaattttcttacctttgatctggtcgatttctaccgggccgttccagccttcgatagttactttttccgtttcgaggtcggcggtcgcttcgtaagtcagcaggctacccacttcggaagcgagttcgcgaaagcgcttggtgctgatatcttgctcacgcatcagtcccagcttgtgtttgacgagtgggtgtttgacttccacgatcttcatactctttctcctttgaggggcagccacaaaaaaaatcgacggattatacctcctttcttcaaggcggcaatattcttttcgttgactttagtcaaaatgataacggtttgagataaagttattttatattcagatggttatgaaagaagattattccatccgaaaactaacctttaccctggcacaagtcttctttcgccgcgcgcctggggaaaagacgtgcaaaaaggttgtgtaaagcagtctcgcaaacgtttgctttccctgttagaattgcgccgaattttatttttctaccgcaagtaacgcgtggggacccaagcagtgaccgataaaacctctcttagctacaaagatgccggtgttgatattgacgcgggtaatgctctggttggaagaatcaaaggcgtagtgaagaaaacgcgtcgtccggaagtgatgggcggtctgggcggcttcggtgcgctgtgtgcattgccgcaaaaatatcgtgaacccgtgctggtttctggcactgacggcgtaggtaccaagctgcgtctggcaatggacttaaaacgtcacgacaccattggtattgatctggtcgccatgtgcgttaatgacctggtggtgcaaggtgcagagccgctgtttttcctcgactattacgcaaccggaaaactggatgttgataccgcttcagcggtgatcagcggcattgcggaaggttgtctgcaatcaggctgttcactggtgggtggcgaaacggcagaaatgccggggatgtatcacggtgaggattacgatgtcgcgggtttctgcgttggcgtggtagaaaaatcagaaatcatcgacggctctaaagtcagcgacggcgatgtgctgattgcactcggttccagcggtccacactcgaacggctattcgctggtgcgcaaaattcttgaagtcagcggttgtgatccgcaaaccaccgaacttgatggtaagccattagccgatcatctgctggcaccgacccgcatttacgtgaagtcagtgctggagttgattgaaaaggtcgatgtgcatgccattgcgcacctgaccggcggcggcttctgggaaaacattccgcgcgtattgccagataatactcaggcagtgattgatgaatcttcctggcagtggccggaagtgttcaactggctgcaaacggcaggtaacgttgagcaccatgaaatgtatcgcaccttcaactgcggcgtcgggatgattattgccctgcctgctccggaagtggacaaagccctcgccctgctcaatgccaacggtgaaaacgcgtggaaaatcggtatcatcaaagcctctgattccgaacaacgcgtggttatcgaataatgaatattgtggtgcttatttccggcaacggaagtaatttacaggcaattattgacgcctgtaaaaccaacaaaattaaaggcaccgtacgggcagttttcagcaataaggccgacgcgttcggccttgaacgcgcccgccaggcgggtattgcaacgcatacgctcatcgccagcgcgtttgacagtcgtgaagcctatgaccgggagttgattcatgaaatcgacatgtacgcacccgatgtggtcgtgctggctggttttatgcgcattctcagcccggcgtttgtctcccactatgccgggcgtttgctgaacattcacccttctctgctgccgaaatatcccggattacacacccatcgtcaggcgctggaaaatggcgatgaagagcacggtacatcggtgcatttcgtcaccgatgaactggacggtggcccggttattttacaggcgaaagtcccggtatttgctggtgattcggaagatgacatcaccgcccgcgtgcaaacccaggaacacgccatttatccactggtgattagctggtttgccgatggtcgtctgaaaatgcacgaaaacgccgcgtggctggatggtcaacgtctgccgccgcagggctacgctgccgacgagtaatacccccgtaattaaagcgccagctctgccgctggcgtttttcaattcacctgtaaatcgcaagctccagcagtttttttcccccttttctggcatagttggacatctgccaatattgctcgccataatatccaggcagtgtcccgtgaataaaacggagtaaaagtggtaatgggtcaggaaaagctatacatcgaaaaagagctcagttggttatcgttcaatgaacgcgtgcttcaggaagcggcggacaaatctaacccgctgattgaaaggatgcgtttcctggggatctattccaataaccttgatgagttctataaagtccgcttcgctgaactgaagcgacgcatcattattagcgaagaacaaggctccaactctcattcccgccatttactgggcaaaattcagtcccgggtgctgaaagccgatcaggaattcgacggcctctacaacgagctattgctggagatggcgcgcaaccagatcttcctgattaatgaacgccagctctccgtcaatcaacaaaactggctgcgtcattattttaagcagtatctgcgtcagcacattacgccgattttaatcaatcctgacactgacttagtgcagttcctgaaagatgattacacctatctggcggtggaaattatccgtggcgataccatccgttacgcgctgctggagatcccatcagataaagtgccgcgctttgtgaatttaccgccagaagcgccgcgtcgacgcaagccgatgattcttctggataacattctgcgttactgccttgatgatattttcaaaggcttctttgattatgacgcgctgaatgcctattcaatgaagatgacccgcgatgccgaatacgatttagtgcatgagatggaagccagcctgatggagttgatgtcttccagtctcaagcagcgtttaactgctgagccggtgcgttttgtttatcagcgcgatatgcccaatgcgctggttgaagtgttacgcgaaaaactgactatttcccgctacgactccatcgtccccggcggtcgttatcataattttaaagactttattaatttccccaatgtcggcaaagccaatctggtgaacaaaccactgccgcgtttacgccatatttggtttgataaagcccagttccgcaatggttttgatgccattcgcgaacgcgatgtgttgctctattatccttatcacacctttgagcatgtgctggaactgctgcgtcaggcttcgttcgacccgagcgtactggcgattaaaattaacatttaccgcgtggcgaaagattcacgcatcatcgactcgatgatccacgccgcacataacggtaagaaagtcaccgtggtggttgagttacaggcgcgtttcgacgaagaagccaacattcactgggcgaagcgcctgaccgaagcaggcgtgcacgttatcttctctgcgccggggctgaaaattcacgccaaactgttcctgatttcacgtaaagaaaacggtgaagtggtgcgttatgcacacatcgggaccgggaactttaacgaaaaaaccgcgcgtctttatactgactattcgttgctgaccgccgatgcgcgcatcaccaacgaagtacggcgggtatttaactttattgaaaacccataccgtccggtgacatttgattatttaatggtatcgccgcaaaactcccgccgcctattgtatgaaatggtggaccgcgagatcgccaacgcgcagcaagggctgcccagtggtatcaccctgaagctaaataaccttgtcgataaaggcctggttgatcgtctgtatgcggcctccagctccggcgtaccggttaatctgctggttcgcggaatgtgttcgctgatccccaatctggaaggcattagcgacaacattcgtgccatcagtattgttgaccgttaccttgaacatgaccgggtttatatttttgaaaatggcggcgataaaaaggtctacctttcttccgccgactggatgacgcgcaatattgattatcgtattgaagtggcgacgccgctgctcgatccgcgcctgaagcagcgggtactggacatcatcgacatattgttcagcgatacggtcaaagcacgttatatcgataaagaactcagtaatcgctacgttccccgcggcaatcgccgcaaagtacgggcgcagttggcgatttatgactacatcaaatcactcgaacaacctgaataaccctatgccaatacacgataaatcccctcgtccgcaggagtttgctgcggtcgatcttggttcaaacagttttcacatggtcatagcccgtgtggtagatggtgccatgcagattattggccgcctgaaacagcgggtgcatctggcggacggcctggggccagataatatgttgagtgaagaggcaatgacgcgcggtttaaactgtctgtcgctgtttgccgaacggctacaagggttttctcctgccagcgtctgtatagttggtacccatacgctgcgtcaggcgctgaacgccactgactttctgaaacgcgcggaaaaggtcattccctacccgattgaaattatttccggtaatgaagaagcccgtctgatttttatgggcgtggaacatacccaaccggaaaaaggtcgcaaactggttattgatattggcggcggatctacggaactggtgattggtgaaaatttcgaacctattctcgttgaaagccgccggatgggttgtgtcagctttgcccagctttattttcctggcggggtcatcaataaagagaattttcagcgcgctcgcatggcggcagcacaaaaactggaaactttaacctggcaattccgtattcagggctggaacgttgcaatgggcgcttccggtaccataaaagccgcccatgaagtgttaatggaaatgggcgagaaagacgggataattaccccggaacgtctggaaaaactggtaaaagaagttttacgtcaccgtaatttcgcatcgctgagtttaccgggtctttccgaagagcggaaaacagtcttcgttccgggactggcgattttatgcggtgtgtttgatgctttagccatccgtgaactgcgcctttctgacggggcgttacgcgaaggcgtactgtatgaaatggaaggacgtttccgtcatcaggatgtgcgtagtcgcaccgccagcagcctcgccaaccagtatcacatcgacagcgaacaggcccgacgggtgctggataccactatgcaaatgtacgaacagtggcgggaacagcaaccgaagctggcgcatccgcaactggaggcgctactgcgatgggccgccatgctgcatgaggtcgggttgaatatcaaccacagcggtttgcatcgccactccgcttatattctgcaaaacagtgacttgccgggttttaatcaggaacagcagctgatgatggcgacactggtgcgctatcaccgtaaagcgattaagctcgacgatctaccgcgctttaccttgtttaagaagaaacagttcctgccactgatacagctattgcgccttggcgtattactcaacaatcaacgtcaggcaaccaccacaccgccaacattgacgctgattactgatgacagtcactggacactgcgtttcccgcatgactggtttagtcagaatgcgctggtactgcttgatctggaaaaggagcaagaatactgggaaggcgtggctggctggcggttgaaaattgaagaagaaagtacaccagaaatcgccgcttaatactttgcgggccgacgagaaatgtcggcccgcattattcaggcactttcgcgaatgggttcgatttcattcagcgtatcaattaacggctgcggcttaccaataagataaccctgcatataatcgatccccaaagagagcaccgcctcgcggatctcttcgttttcaacgtactctgccactaccagcattttcttcattcgcgccaggtggcaaatcgatgccactatctgataatccagactatttgacacaatattgcggataaaactgccgtcaattttaagcagatcggcattcacatttttaagccgcgcatagctggcgtagccggtgccgaaatcatcaatcgcaatctggcagcctaattcctgaagatgctgcaaggtgatttgcgcctgcttaacattggtcagagcattactttcggtgacttcaaaaataagttgccacgcttcaatctgatatttagccagcaactgactgacttcaacaggaaaacgagcctgacataccgaggttggagacagattaatagcaaaacggtgagcgggcatcttcgctctgttttcagccataaattgcagcgtatgctcaatgacccacatgtcgatactcgacgataaaccaaattcgtgcgcgaccggcaagaagctatcggggctgatcagttcatcattctcacctttcatgcgcagaagaatttcatggtaaacatcaccacgcataccggtaatcggctgggccatcaggaaaaaatggttgtgttccagcgcctgctgtagtcgattcatcatcgcgactttatctttcaattcgcgttgcaaatacattgccccgcgacgctgcatattttccggggcgttggtcacgatggaaagttcggcgaccgtatttagctctcccagcagcaggtagatatgattcactggcgagcgcacatagcagtaactgacgccaatctgcggttgcatcggcatgccatcccaaaagaaacgaaattgcttgagatggctatccagtgcggtaatgcgctcctggtgcgattctgtattcagtcgcagcgcgagatcgttacccgaaagctgataaacatcttcacccggttccagcaagggtgacagccagtgagaaagtttttgcttgtattgaatccgcagcatgatgccatagttcttaaccagcatttccatgccagggatgcgtaaataacaaagcgcagaccagggggcatcacgcaacgcgcgattcagggcgcgaacatttggcagatgaaccaccgggtccacatacgcaagccgctgaatgcgtctgactaccgctctctgacgggttgccagtacagccatataattgacaataaaagagaataccagataactggaggaggttatggtcagctgcgtggtatagccaggataaatgggaatgtaattttgatagctgtggatgctgatcatcaacacgaccgcccagagcagcgaaatcagcttataaccatagcgcatcgctccccacatcatcaggggcagcaataatgacaaggtataattggtgctaaaaattgtgcttttttcatttaacggcatgcataacagcaacaataaagcacctaatgccagtagccagagcgcgaactcttttttggtgactttggcatcaacctgctgttttaattgcgaataatagctacgtaaataaaatggatttcgcactacccgaatgatgaagtagcacagcgggacaccgatcagattacccaccagtaaggcctgataattgattaaagtcccgaggttaaaaggcatgacaccgaccagattttctctgctcgccagtaatcctacaaatgcagcaaactggaaaagtatcagaaacagcgttgcaggaaacacaatctgccagaatatacgctgggaaattaaacgggtatcaccatgtgaaacgttgttacgccggggagtaaagaccctgtaaccgccccaacagagaatgataatgataataaaattagccgttaatgatagcgtttcgtaaaaacccagctctgcatatttgcggacaaaaatccctaaggcgatccctggcaatgccgcccagctgaaaaacatcatcatgctgatcatcagtgccagaggcagataaaagagaaaaacctcaccggaagaaatatgcgcgaaagtattaatgtgggcgaaaatgggcaagattaaagaaggcaggaacagcggaagcccccaccatttatcacgtatttttatataagttgcattcagtttcatagatgctcagcagaatcccccacatcctgaaggaggtgtattcagacaggcatcccacctgacttcgaatgatgattattcatcactatagagagcattgattctaagtgtcatatgaaagtaccaattgatatatatcaaacaaaataaccctgattaatgaattattacgtttatcatgttaattcatcattattacatcatcattgtaaataattaaattaacttccataacattaaaatatgtatccactgacgcttttttacataacgaagaattgaccattttgtcctgttgtgccttaatgtaagtaccgtccacagcgtgggacatacttcaaggaaccttttgtgagtcaggcaaccagtatgcgaaaacgacaccgatttaacagtcgcatgacccgtatcgtactgctcatcagctttatcttcttctttggccgttttatctactcgtccgtcggtgcctggcagcaccatcagagcaaaaaagaagctcagcaatccacactctccgtcgaatcaccggtacaacgttagcggttaccttctccactttcacagaacataacggcacttcgctgtcggatgcttttgctgtttgggattatcaaagcggcagatattctttcatcttaaattttacgtctttatcctgactgatgtttatcctgtttggctgcgaaataaatataaaattaatatatatgttgtaatgatatatttttataaattattccctgcgtgaattttaataaatttaatctatccctttatacgcaatacatttactttcctcttttgatgatcttaaatgtcttatttttcgtaatgtgtataacaaggaatagtgatgaaatttaaaaaatgtcttctgcctgtggcaatgttagcgtcattcactctggcaggatgccagtcaaatgctgacgatcatgctgccgatgtttatcaaaccgatcaactgaataccaaacaagaaactaaaaccgttaatattatttccattcttcccgcaaaagttgccgtagacaactcccaaaataaacggaacgcacaagccttcggcgcgcttattggcgcagtcgctggcggtgttatcggccacaacgtcgggtctggcagcaattccggaacgacggcaggtgcagttggcggcggagctgtaggcgcggcagcgggttctatggtgaatgataaaaccttagtggaaggtgtttctttaacctataaggaaggcaccaaagtgtatacctctacccaggtgggtaaagagtgccagtttacgacaggtttagccgttgttattaccacgacgtataacgaaacgcgtattcagccaaataccaaatgtcctgaaaagagctaataatcaggaggagtcatgaagaaagtttttctttgcgccatcttagcctccttaagctatccggctatcgcctcatcattgcaggatcaactctctgctgtcgcagaagcggaacagcaaggtaaaaatgaagagcaaaggcagcatgacgaatgggtcgcggagcgcaacagggaaatccagcaagagaagcaacgtcgcgcaaatgcccaggccgccgctaacaaaagagcggcaacggcagcggcaaataagaaagctcgtcaggataaactggacgccgaagcctctgcggacaaaaaacgcgatcaaagttatgaagatgagctacgcagcttagagattcagaaacaaaaactggcgctggcgaaagaagaagcccgcgttaagcgagaaaacgaatttatcgatcaggaactgaagcacaaagctgcgcaaaccgatgtggtgcaatctgaagctgacgccaacagaaatatgactgaaggcggtcgcgatctgatgaaaagcgtgggcaaagcagaagagaacaaatcggacagctggtttaattaatcgatgttagtaacttcaatcctataattcttgaagataaaaaaccctctgtagtaacagagggttttgttcattcatagtgcagggtcaaatcattcccactcaatggtagctggcggcttgccgctgatgtcatacaccacgcgggaaataccgttcacttcattgataatgcggttggaaacgcgaccgaggaaatcgtacggcagatgcgcccagtgtgcggtcataaagtcgatggtttcgacagcacgcagagagacaacccagtcatacttacgaccatcgcccattacgccaacggaacgtaccggcaggaacacagtgaacgcctggctgactttgtcgtacaggtccgctttacgcagttcttcaatgaagatggcgtcagcacggcgcagcaggtcacagtactctttcttcacttcacccagaacacgaacgccaaggcctggtcccgggaacgggtgacggtacagcatgtcgtacggcaggcccagctccagaccaatcttacgcacttcgtctttgaacagctctttcagcggttcaaccaggcccatcttcatctctttcggcaggccgcccacgttgtggtgagatttgatgacgtgtgctttaccggttgcagacgccgcagattcgataacgtcagggtagatggtgccctgcgccagccacttcacgtcttccagtttcagcgcttcttcatcgaatacttcaacgaaaacgcgaccgatgattttacgttttgcttccggatcgttttcgccagccagcgctgacaggaagcgatcttctgccggtacgtgaacaatgttaagaccaaagtgatcgccaaacatatccagaacctgctctgcttcgttgaggcgcagcaggccgttgtcgacgaatacgcaagtcaggtttttaccgatagcgcggtgcagcagcattgcggttacggaggaatccacaccaccagagaggccgaggatgactttatcgtcgcctacctgctcgcggatgcgagctacagcatcgtcgataattttcgctggcgtccacagggcttcacactggcagatatcacgcacaaaacgctccagcatgcgcataccctggcgggtatgagtcacttccgggtggaactgtacgccatagaagcgtttttcttcgttagccataatggcaaacgggcagctttcggtgctggctacggtgatgaagtcggacggaatagcggtaactttatcgccgtggctcatccagacatcgagcagcggtttaccgtctgcggtcagcgcatcttcgataccgcgaaccagtgcgctgtcgtttacgacttcaacctgcgcgtagccaaattcacgttcgttagaggcttcaacgtgaccgcccaactgcattgccatggtctgcatgccatagcaaacgccgaataccggtacgcctgcttcaaagacatactgcggcgcacgcggactgttttcttcagtagtactttccgggccgccggaaagaataatgccgcttggattgaagtcacgaatttgtgcttctgtcacatcccacgcccacagttcgcagtaaacacccagctcacgcacgcggcgcgcaaccagttgagtgtactgagaaccgaagtccagaatgaggatgcgatgcttatgaatgttttccgtcattgacgcttattccgaggcaagtgaaacagataatataaatcgcccgacatgaagtcgggcgaagagaatcaggagcccagacggtagttcggggactctttagtaatggtcacgtcgtgaacgtggctttcctgaatgcccgcaccgctgatacgtacaaactccgctttagtacgcagttcgtcgatagtaccacagccggtcagacccatacaggagcgcaggccgcccatctgctggtgaatgatctctttcaggcgacctttataggctacgcgaccttcgataccttccggcaccagtttgtcggcagcgttatcgctctggaaataacggtcagaggaacctttggacatcgcgcccagggaacccataccacggtaagatttgtaagaacggccctggtagagttcgatttcacccggagattcttcagtacccgccagcatggaacctaccatcaccgcgcttgcgccagcggcgatagctttggcgatgtcgccggagaagcgaataccgccatcagcgataaccggaataccggtgccttccagggcttctactgcgtcagcaacagcggtaatctgcggaacaccgacgccagtcacgatacgagttgtacagatagagccagggccaatgccgactttaaccgcactgcaaccagcttctgccagagcgcgtgcacctgcagctgttgccacgttgccgccgataatttgcagatccggatatttagcacgggtttcacggatacgttgcagtacaccttctgagtgaccgtgggaggagtcgatcagcagaacgtcaacgcctgcggcaaccagcgcgtcaacacgctcttcgttacccgcacctgcgccaaccgctgcaccaacacgcagacggccttgctcgtctttacaggcgttcggtttacgttccgctttctggaagtctttcacggtgatcatgccgatcaggtggaattcgtcatcaaccaccagcgctttttcaacgcgtttttcgtgcatttttgccagcaccacttcacgggcttcaccttcacgcacggtgaccagacgctctttcggcgtcatgtaaacgctaaccggctggttcaggtcggtaacaaaacgcacgtcacgaccggtgataatacccaccagttcgttttcttcggtaacgaccggatagcccgcaaaaccgttacgctcggtcagttctttcacttcgcgcagcgtcgtggttggcagaacagtctgcggatcagtcaccacaccagattcgtgttttttcacacggcgaacttcttctgcctggcgttcaatggacatgtttttgtggataaagccgataccgccttcctgagccagagcaatagccaggcgcgcttccgttacggtatccattgctgcggaaagcatagggatattcagacgaatagttttcgtcagctgggtgctgaggtcagcagtattcggcagaacggtagagtgagcaggaacgaggagaacgtcgtcaaacgtcagagcttctttagcgatacgtagcatgggcaatatctcgaccagagtggttaataaatattgccgcggcattatacagagcgtaaccgattgcatctacccctttttgcaaaaaatgcttgctatccccgaagggcgggttactatcgactgaataacctgctgatttagaatttgatctcgctcacatgttaccttctcaatcccctgcaatttttaccgttagtcgcctgaatcaaacggttcgtctgctgcttgagcatgagatgggacaggtttggatcagcggcgaaatttctaatttcacgcaaccagcttccggtcactggtactttacactcaaagacgacaccgcccaggtacgctgcgcgatgttccgcaacagcaaccgccgggtgaccttccgcccacagcatgggcaacaagttttagttcgcgccaatattacgctctacgagccgcgcggcgactaccagataatcgttgagagtatgcagccggccggtgaagggctgctgcaacagaagtacgaacagctcaaagcgaagttgcaggctgaaggtttgttcgatcagcaatacaaaaaaccacttccctcccctgcgcattgcgttggtgtgatcacctcaaaaaccggtgctgcgctacatgatattttgcatgtgttaaaacgtcgcgatccttctctgccggtgatcatctaccctgccgccgttcagggcgatgacgcgccggggcaaattgttcgcgccattgaactggcgaatcagcgcaatgagtgcgacgtattgatcgtcgggcgcggcggcggttcgctggaagatttatggagttttaacgacgaacgcgtagcgcgggcgatttttaccagccgcattccggttgtcagcgccgtcgggcatgagacggatgtgaccattgccgattttgttgccgatctgcgtgcgccaacgccgtctgccgccgctgaagtagtgagccgtaatcagcaagagttactgcgccaggtgcaatcgacccgtcaacggctggagatggcgatggattattatctcgccaaccgcacacgtcgctttacgcaaattcatcaccgattacagcaacagcatccgcagctccggctggcacgccagcaaaccatgcttgagcgcctgcaaaagcgaatgagctttgcgctggaaaatcaacttaagcgtaccgggcaacagcagcagcggttaacacagcggctgaatcagcaaaatccacagccgaagattcatcgcgcgcaaacgcgcattcagcaactggaatatcgtttagcagaaaccctgcgcgcacagcttagcgccacgcgtgaacgtttcggtaatgcagtaacgcacctcgaagccgtaagcccactgtcaacgctggcgcgtggatacagcgttactactgctactgacggcaatgtactgaaaaaagtgaagcaagttaaagcgggtgaaatgctaaccacacgtctggaagacggctggatagaaagtgaagtaaaaaacatccagccagtaaaaaaatcgcgtaaaaaggtgcattaagccagcacgaattcaacgcgttttttcgatatcaagccatgcccgtgctgacagaagtaatctactgcaccacaggcttttaacacctgcaacggttgatggcagtctggacaaagagctttcatttcaataaattccccgcaggatcggcaacgcgcatggccgttatcctgatcaagcacatgctgacattgtggacaatgcagttccatatgaattcctccggtagccattccctctacattcatagagggaatggcagataaaatacttacggataattatttatttttcttgatgtgcttcatcagacgcttacgtttacgcatctgggttggcgtcagggtgttacgcttattcgcatacgggttttccccttctttgaactgaatacgaatcggcgatcccattacgtccagcgatttgcggaagtagttcatcaagtagcgcttgtaggaatcaggcaggtctttcacctgattaccgtgaatcaccacaatcggcgggttataaccaccggcgtgggcatatttcagcttcacacgacgaccgcgtaccagcggcggttggtgatcttcaacagccatcgtcatgatgcgcgtcagcatagaggtccccacacgacgggtggagctgtcatacgcttcacgtactgattcaaacaagttaccaacaccactgccgtgcaaggcagagataaagtgcacacgagcaaaatcgataaagcccagacggaagtccagcgtttctttcacctgctctttcacttcctgactcaggccatcccacttattcaccacaatgacaagtgagcgcccactattgagaataaagcccagcagcgagagatcctgatcggaaataccttcgcgcgcatcaatcactaacatcaccacgttggcgtcttcaatggcctgcaacgttttgattacggagaatttctctacagcatcggtgattttgccgcgtttacgtacgccagcggtgtcaatgagcacatactcacgtccatcgcgttccattgggatgtagatgctgtcacgcgtcgtgccaggcatgtcgtaaacaacaacgcgctcttcaccaagaatacggttagtgagtgtagacttacctacgttcggacgacccacaatcgccagtttgatcggcagactttgcgggtcgaagtcgtcttcctcttcttcttcgccgttctcttccgcttcaaattgcgcccagtattcagcgtcttcgtcgacttcctcttgcggtgcgagatcttccatccacggcagcagcacatgctccagcagacttaatacgccacgaccgtgagacgcggcgatcgggtagatttcacctaaaccaagcgagtagaaatcaaccactgcctgatcgggatccagaccgtcagttttgtttgccaccaggaaggtcggtttttcacgggagcgcagatgtttggcaatcgcttcatctgccggcatcaggcccgcgcgcgcatccaccataaacagtacgacgtccgcttcttcaatcgccagcagcgactgttccgccatgcgggtttctacaccgtcttctgtgccatcaatcccgccggtatcaatacagataaactcacggccttcaatttccgcacgaccgtacttacggtcacgagtcagacccgggaaatccgcaaccagcgcatctcgggtgcgagttagacggttaaataacgtggattttcctacgttagggcgcccgacaagcgcgaccacaggtaccatgtttaaagcctcatttttataaatcatcagacaacgcacgctatattcgcgtcgttgttaaaaacaggaaaacggcccctgtccaggagccgttttcaaagtgaacgacagagacgattaacgtgtaatagagtacacggttccgtcttttgcctggatcagcagtttgccgtcagcggcaaccggttcagtctggaaaccggaactatcaactttttgctgggcaacgaaacgaccatcttcgacgttaatccagtgcagataaccttcactgtcaccgaccaccaggttgccattatacagcaccggagaagtcagcaggcgatgcagcagatcgctttgtgtccacagcgtaacgccgccatcaatggtcaacgccatcacccggtcattttgatcgaccagatagatgcgattgccgtcgacgatgaaatcattcaccgaacccagttcgcgtttccacataatctgaccactgcgcagatcaagcgccgtcaggttaccattataggccagcgcgaaaacaacgccgttaacaacgacgggagtcgtgtcaacatcgctcagacggtcaatttcggtagaaccggtcgcctgggaaatacgctgctgccaaatcatctggccctgttccatcagcactgcgctgacgcgaccattatcgccccccacgacggccgcaccaaaagccgttgtcggcgcagactcgccacgcaaagagagcgaaggcatatcgaggttaactgtccatttgacagcgccgtcagcttcgttcagcgcttgtaactgaccgttactggtgtggattaacaccagaccgtcgctgaccaccgggcgcgaaagtgcttcacccgcgactttagtttgccatgccacagtaccatcgctggtattcagcgcgtaaacctgcgccttttcgctgccaatgtagacatgcccaccagacacggtcacaccgccagaaagtaatgcaggctctttagagaaccagccatctttctcggccaggctgacagaccagatttctttgccatcatccgcattcagcgcttttactaaaccagcgcggtccgctgcatagacaacgttgtccgccagtgccggatgaagattggaatagaagttgccaatgccgctaccaacggaagtgctccacgccgtggtcggcgtaaactggttttcaacggttggcaatggggacatctttaccacatcttcttcgctgttaaacagcgaacagccgcttaaaagggtaacggaaagcagtcctggcagcagtaatttacgcaattgcatcgggtccctctcagatggacaaattattaattttcatctgcatcatttcgctcagtgccggagtaacatcgcttttcacgcctgcttcccatgcactacgcgcaccttgcttatcacctttgctcagcaatgcttcaccacgcaggtcggcaacaatggcagcccacccttcacctttgatggtatcaagggttttcagcgcggcatcagcctgcttgagctgtacctgaacgcgagcaagacgcagatttatcacggctttgagattttcatcgctcgtgtctgccagcccctgttgtaactgggcggcagctttctctagttcatttttgtcaacaaattgctgcgcaagttccaaagaagccagcgcaccataagtatttttattttcagcagcaaatttttccgccgccgggatgctatccggtttgccttcgctcactgcggtaaccgcattttgataggcaagagaagcggagcgtgcagaatcaacctgatggctgttccagtagcgccagccaatcagtgcgccaacgcccaaaatcaccccaacagccagtgctttgccattttcagcaaaaaagcgtttaaccgcttctacctggtcgttttcgttctcgtaaatttccacgctgtccttctccttccttaacccagtaacgtgcgcaaatgcgcggctacgctatcctgcgcaactgccgtttgctcaccagagcgcaaatccttcactactgctgtgccgttagccacttcagactcacccagcaccacagcaacgcgggcaccccatttatcagcacgggcaaactgtttcttaaagttgccgccgccgtggttggtcatcaatttcacgcccggtaattcatcacgcagacgctcagctaatgccatagccgcagattgtgtatcagcacctgaagccaccaggtatatatcgacaacaggatcggctttaaattccggattaacggcctgtactaacaatacaagacgttcgaggcccatagcaaaaccgacagccggtgttgcacgaccgcccagttgttccacaagaccgtcataacgaccgcctgcacacacggtgccctgggagccgagactgttagtcacccactcgaaaacggtacggttgtagtaatccagaccacgcaccagacgctggtttacggtgtaagcgatccccgcgctctccagcagtttgcacagaccggcaaaatgctcacgagattcctcgtccagatagtcacctaatgccggagcgtcgttgagaagcgcctgcacttccggattttttgaatccagcacgcgcagcgggttagtgtacatgcggcgtttgcagtcttcgtccagcttttctttatgctgctcaaggaatgccaccagcgcatcgcggtaattggcgcgtgcttccagcgaaccgatagagttcagctcaagagttacgtgctcggaaatacccagcgcgcgccaccagcgggcagtgagcataatcagttcagcgtcgatatccggaccttgcagaccgaaaacttcgcagcccaactgatggaactgacgataacgccctttctgcggacgctcgtgacggaacatcggcccgatataccacagacgctgttcctgattgtacagaagaccatgctcgatgccggcgcgtacacagcccgccgtcccttcagggcgcagagtcaggctgtcgccattgcgatcctcaaaggtgtacatctctttttcaaccacgtcggtgacttcaccaatcgcacgtttgaatagcggggtctgctctacaatcggcaagcggatttcactgtaaccgtagctgccgagcacgtttttcagtgtgccttcaatgcgctgccagatggccgtttcgccaggcaggtaatcgttcatgccgcgaatggcttgaatgttttttgccacgtttattctctttctgaatataaaaatgaaccctcaacgcttccctcaatgtttcgggagccatgcgggttcaatcatacacgggaagcgaggcgcttcccatcacgttattatttttcaacctgctgaacgtcaattcgacgcgcttcgtccagctgactggctttcgcacgaatgcgtgcttccagctggtcgatcatatcgttgttgtccagacggtctttgcgcacgccatcttcatagaggccgcttttcttgttgccgccggtgacgccgagtgtagaaaccagcgcctcacctgggccattcaccacgcagccgataatcgaaacgtccatcggagtgatgatatcttccaggcgttgctccagcgcgttaaccgtaccgataacatcaaattcctgacgcgaacaggtcgggcaggcgatgaagttgatccctcgcgaacggatacgcagcgatttcaaaatatcgaaaccgactttgatctcttcgaccggatcggccgccagcgatacgcgcagcgtgtcgccgatgccttcagacagcagcagacctaaaccaatggcggattttactgccccgctgcgcgcaccaccggcttcggtgatccccagatgcaacggctgatcgatctgttttgccagcaaacgataagactcaacagcgaggaagacgtcagacgctttcacgctgactttgaactgatcgaagttcaggcgatcgagatgatcaacatgacgcatggcagattccagcaacgcctgcggcgtcggttcgccatacttttcttgcagatctttttccagcgatccggcgttaacgccaatacggatcggaatgtttttatcgcgcgcacagtcaaccaccatgcgaatacgctcttcattaccgatattgccagggttaatacgcagacaatcgacgccgtattccgctactttcagcgcaatgcgatagtcgaagtggatgtcagccaccagcggcacgttaacctgctgtttgatgagtttgaacgcttctgccgcgtccatcgtcggtacggatacacggacgatatcagcgccaacgcgttccagcgccttgatttgattgaccgttgcttcgacgtctgtcgtacgcgtattggtcatggactgtacggcgatgggagcaccatcgccaatcggcacattcccaacgtaaatacgtgttgattttctacgttgaattggagcctggttatgcatgaaaaatctcccgcgttacccgtctgttactgcgccggtgattgttcggcattgagggtcagacgcgcaacctggttagttctgataaaacgactcagatcgacaggtttcccttgatactggatctgtactgcggctggcgcaccaattttcagtttgtacggtgcctggccggttaagttcaaattaccgtctttacgctgcataccgctaaacaattttttaccggtagcatcagtgacctccagccagcaatcggcagtaaagttcatcaccagcgcattcggatcagccaccggcgtggtcacgccagcctgatcggttggcaacggcgcagcaccatctggcgttgttgctgccgttggtgccggggtcgcggcggtatcaacatttgcctgcgaaggcgaaacaaccgcattctgttgcggatcaacagctggtgctggcgcagttacggcaggtgtttgcgtgttggttgcggtagtatccacagacgctggcggcgtggacgttgtagccgggtctgtagttgtcgacgtatttaatggaacactctgcccctgctcgctattactgctcagttccgccgaagattgatcggccatagtggtgatctcttcctgctgagctttgcggtcttgccaccaccaggcaccgctcaggccgataaccacaaacaacaccagccaagtgaaggtcatcagccagccgtcgcgttttttgcggcgtttaccgagggaaaaactctgcatcggcgcaacttttgcagcccgaagtggagcctgcttttccagccctggcagcagttcttcttctggaatatgtaccagacgcgcataagagcggatatatccgcgcaggaatgttgaagcaagatcggcgggtgccttatcttcttcaatgtcgcgtaccgtggaaaccttcaggcaaagtcgctcggcaacggcctgctgactaagtcctagttgttcgcgagcattacgcaggcgagcgccggtagtaagtgcttcattttggtcgtgcgtggcttcagtattcattcgctgcaggtacgtttaaatgagaattgagatgccggtgaaccatcatgctcacccacaccgcgaaacatccgttaagttaaccgttatcatacagtataagaccgtctgtgtgctcgtgacaaagcccacattcactaaggctaacttactgttgcatcgttacatactgccttaaagtcagcaaaaacgcaccgttaatattgaccagacaattgcaacttaatacttcattcataaaacattacgccacggtacataaagtaaccgtggcgtaatggctatcagaccgctttaatgtcgatggcttcaccctgcatccgtttacgcagggtacgtttcgtacggtcgataacatcgcccgccaactgaccacaggcagcatcgatatcatcaccacgagttttacgcacaatagtggtgaaaccgtagctcatcagcacttttgagaaacggtcgatacggctgttcgagctgcgtccatacggcgcacccgggaacgggttccacgggatcaggttgatcttacacggcgtatctttcagcagttccgccagttggtgcgcgtgttcagtgccgtcgttaacgtggtcaagcatcacgtattcaatagtgactcggccctgattggcgttggatttctccagataacggcgcaccgcagcaaggaacgtttcgatattgtactttttgttgatcggcacaatttcgtcacgaatttcgtcgttcggcgcgtgcagggaaattgccagtgcaacgtcgatcatatcgcccagtttatccagcgccggaactacaccggaagtggaaagcgtgacgcgacgtttagacaggccaaaaccgaaatcatcaagcatgatttccatcgccggaacgacgttgttcaggttgagcagcggctcgcccatgcccatcatcactacgttagtgatcggacgctgaccggtgacttttgctgcgccgacgattttcgccgcacgccacacctggccgataatttccgacacccgcaggttgcggttaaagccctgctgggcggtggaacagaatttacactccagcgcacaccccacctgcgaagagacgcagagcgtggcacggtcgtcttccgggatatacaccgtttcgacgcgctgatcgccaacggcgatcgcccatttaatggtgccgtcagatgaacgctgttcttcaaccacttccggtgcgcggatttccgccacctctttcagtttgccgcgcaacactttgttgatgtcggtcatctcatcaaagttgtcgcagcaatagtgatacatccacttcatcacctgatcggcgcggaagggtttttcacctaaatctttaaaaaactcccgcatctgctgacggttgagatccagcaggttgatttttccatctttcgtggtgacgttttcaggtgtgactaattgttcagacatatgctattccggcctcgttattacacgttatggcccctggagggttgaaaaaagaaacgccccggtgagcggctgctcgtccgggggcgctgcattgtacaaattctggcgcacggatgccacgtttgcacgcggcatttacgaaattattaacgggtgcgcgggcacacttcgccttcgccaaagaaataagcgatttcgcgagcggcagattcgacggaatcagaaccgtgggtaccgttttcggtcaggctgtcagcgtaatcagcgcgcagagtaccagccagtgcgtttgccggattggtcgcgcccagcagatcgcggtgacgctgaacggcgttttcaccttccagcacggaaaccacgatcgggccagaggtcatgaattcaaccagaccatcaaagaacggttttccatcgtgttcagcataaaagccacgtgcctgttcaacggtcaggtgcagcattttggtgccaacaattttgaaccctgcagcttcaaagcgcgcaaagatattaccaatgacgttttttgctaccgcgttcggtttgatgatggaaaaagtacgttcaatagccatttttacctctgtaaattgttctgttgttgtctgtaccagcgtacgagatggcgcggattataatgagcaacagggccgttgactattgatgaaggtaacatttttttaaaataaaatgagttttagcaacaatcagggacaaaacagactattgcatgacaaatttcactgtcgcgatttgccccacgtcatccatcaccagcaattgataatcacctttatccgtcaaatgcagggtcacgttgcgcccgcgttcagttaacggttcgccattcagaaaccaccagcgttcacctgcccctccacttgattgcaacggcaaagtcgcttccgctgcgcccggtaaacgtttaataatcgcgccatcgcgaacgcctgtcagctgcagcgggagctgggcatcgtgaccgtatggcgggcaacttgtcgaggccggtggtaagcgcacagcgcgacgttctgatgcgggcagccagggttccagcggtagcggccagacatttatcatttcttgtcgcgcttgcgggcaatcagcggcaacacgtttgccattttcatccagccagatggggaaacgaatgccattaatgccttcctgctccggcagtaatagagttggcggctgactcccgtccagcagccaggttgccaggcggcggcgacagttaccgtcaccttccggcaaagactgtccgcccggccagcagataacgccacgagtgactgagttcgggcgcgggtcttccggcagattcgcactgcgcgacagtaagatattattgacctgattcaacaatggtacggcactggcaaagccaaactgaccaacaacgggcgtgccgtccggtctgccagtccagatcccaatgacatagcgagcgttaaccccaatcgcccaggcgtcacgatagccatagctggtgcccgttttccatgccagtggggcgacgcgcggcaaggcactatccggcaagggttgcgcttcatcagccataatccggcgaatgatccacgccgcccccgacgacattaaaggccgttcaagcagcggatcgtcaggctgtaagcgcaatttgcctgccttgccgtggcgagcaaacgcggtatacgctgccgccatatcttccagttttgcaccagcgccgccgagaatgagtgaaagattcggcgcagcaccgttgggcaaatataacggcaatccaacattgcgtaactttgccgcaaaccgtttcggtccataggcttccagcacctgcacagcaggtaagttcagcgagcgcaccagcgcctcgctcatgctgatcgggccatgaaaaccgctatcaaagttacctggtcgataatcaccggtgcgccgggggacgtcttgcagcagtgatgccgggtggatcaagccttcatccagcgccagaccataaacaaacggtttgagcactgatcctggcgatcggatcgaattgaccatatcaacatgaccaaagcgtgaatcatcgttgagatcaaccgatcccacccagccgcgaacacgcatatcggtatgatcaaccacgatcatcgccagtgagctgcgcggtggcaaccgccctttccagttttgcgccagttcttccagacgtcgttgaagaccggcatccaacgtagtagtgattttgtcgcttttgcttttaccgagcatcatgcgcgaaaacagcggtgccagttgcggcatttgtcggggggccagccagatgggttcttcccttgactcttttacctgctcacgggaccacacaccttgcacggccatccgttcgagcactttattacgcgcggcttcggcacgctccggccaacgatccgggcgaagacggctgggcgcttgcggcaaaaccgccagcattgccgcctcggaatagcttaaattcgcaggcgattttccgagataagcccaacttgccgcaccgatcccctgcaacgtaccgccaaacggagcgcggttaagatacaaggtcagaatttcacgcttagacagatgccattccagttgcaacgcgcgccagagctggcgaattttgccgccaaatgttttggggtgaggatcaagcagacgagcaacctgcatagtgagcgtgctgccaccggaaataacccgtcccgaagtgagatcttgccatgctgcgcgcgccaccgagaatggattcacccccggatgcttccagaaccagcgatcttcataattgatcagcgcttcaaggtaacgtggagaaacatcttcgattgttaccggataacgccagatgccgtcagcatcggcgaagcgccagagcggcgtaccatcctgcgccacgaccactcgtgcgggattgacttcatgcagcggtagaggccagagtttatctgctccccacgctgcaagaaaaaggagaaagggcgcggctgccaacgttatccagcagccgcgtttggttaacaagcgaggcatttacggtctgacaatcagcagatcttcagccgcgccggtcgcccgccattggggaacatacattgattccaccatcggttgcggtacctgatacgttcccggcgtcaccgcccgcgccagatacaccagcgttaccggttggtattcatcaacggcaaccgccgccacaaagcgatcgtcacggaactcaatgtgcttaatgctcgcctgctgcatctggttcagtaagttctgcacttcgccaccactttgctccaggctggcgctaccgttcgccagattctggttttccagttccagacccgcaggcagcagatccacgactaacgcatccggcacgctgttactggcttttacctgcaaccacaccagcaccagatcgccgctacgtaacgagtccagcgatttgctcttaccatcagtaccaagaatatgacgctcgatttgcagcacattgttcgccggtaaaggtgcggattgcggataaccgctggcatccatacgcaaccataacggctgatcgccactgttgctcacctgcaaggtgacaagttgatcgctattcagattgctgttttgcgctttctcgcctgtcagctgctcagctgagaaagaggtttgcgcctgccatttaccgggtaaatcctgaatcgtacgggcagccaggaacaacgcgttactttcctgcgtcgatagccagcgttcaccaaacgcctgctgcgaaagtgtgttcagcaaagtgtactgctcatcgggtagcagtttattttcttccagcaaggagagcattaacgcgttgtcgcgcagtgaactaccgtaatcacccagccatatccgctcatcactattacgcggcgttttcagcgccagcgcaatcgcttcttcaccacgcgtcgcatcacccatggttttcagcgcaacgccaagttgcagcagcggtaaaccagaagcggcatctgcacgatgctcccagatttcacgcagcgcacccagcggagccttttgctgacgggccaacaccagcgcagcgtaagactgtacggcgaatttactggctttgagattatccgcgtacgggatcgacatcatgcccggatcttgtaaatagcgcagcagacgctcattaccccggttaatggcgtctgtcggcacgctgtaaccctgttcgcctgcgcggaccaggaaatccatcacgtaagccgtcagccagtactcttcgtcaccgtttttatcccacagcgcaaagccgccgttatcacgttgcatttgcagcaaacgggaaatgccgatatcgaccgatgcacggcgtttctcatcactgtcgcctttgatgcccaacgcctgcagttgggctgcgttggtataaagtgacggaaacaggccgctggcggtttgctcaagacagccgtacggatacgcttttaactctttgatataacgtgcgatgttcagcggtggtttgccgctcaacaacaattgcccttccagcgtaacaggcgagaagttttgcaatccatccgccggaatcgcccatgtctcaccaggctgtaacgccgtaccgtaattaaccgtttgtgccgggaacgccggacggacgccgattttccactgcttatgctgatcggcaacggtttcacccggtaacgctaacccgctaatggtggcctgaatttctccatcgccataacccggcaatgctcgcaccgggataaacagcgtagtacgcacacctggcgctaattcaacggctgcgggtgaatcgctgaccagttcaagcaaaccactggcggtcagggcaacgttcagtttttgcggtttatcggtaagattagtgatatccagcgtcagacgcgaggtatcgccactcgccataaagcgcggcatgttcagttcagcaatcaccggtgcggcaactatcactttactttcgttgctaccgaagtcatctgccgtccaggcttgcgccatgacgcgcaattcaccgttaaaatcgccaatcggcagtgtaaccgagccttcgccctgttcgttgagcgttaccggcagcgcctgctgcacgacaatattgacgtgattgaccggcggtttaccaccacgtttcagctcatcaccatcgccaccgaaacgcagagctgccagacgcccctgaccttcaataacctgaccgtaaatatcgtaaatgtctgcgccatagcgtttctgaccaaagaacgcctgccacggatctggcgtgacgtagtcagtaatattcagcacaccactatcaacggcagacaccagcacattcacctgtttaggcttctcgccatttttagtgctggctttaattttcacggttaatggttgattgggacgcatttttgctggtgtttccagcgccagatcgaggcgacggttttcatcgccaagcggcagatgcaacacaccaaccgcgcgttttggcgtcgcggagcgagatttatcgccaggacgtaccaccagcgtacttaaatacagatcatgacgattccaggttttatcgaccggaatcgtcagatccagcccttgagcccgaacatcaatctcttgccaccacagcggcccttcactggactcgaccatcgcataacctttacccgccgttggcgcggcgatatgcaacttaatggtgtcgccagggcgataactggctttatccagtttcagcgtgacacggtcgggtcgcactgcgccgctaccgtcgctgttgtcctgccagctatagccagcccagaaacgaacactactgaccgcttcattcggcgctttgacttccagacgataagcgccccactctaccggaaaactgaccttgccggtttcgtccgctttcagatccagagtttgttcattttcgatcagatctttttgatcaaactgtgactgccagccttcatcttctgaccagttccagtagtaatcgcggcgttcgcgaatcaggcgcacctgcaagcccgacacggcttttttcacgccttgcgcatcgctataaacgatgtcaaaagcggcgttactgccttcatcaacaatgggctgtttcaccgtgctgtcagtacgataatcgtaaaccgatttcgaggcgaactgcggacggatccccggcaatgcatcggcaggccagatagcctgctcagcgcggcgcgtcaccgggcgaccgcccgattccagcaaactaccctggaaaataacctgtaatggggaatgcgtttccttccactggctttctgtagaaacttcgccgcgccctttatcatccagcgtcaactgaacttcatccagcgtgcgggaaagattttcggcagctatatcgccgaattcaaaaccaggtaaggctgacacagcttcacgcagtgggcgcaggaaaagttgcccttgcaaagtattaccattagcaggtgcaccatacaggtagtaccccaccacggagaatttcacttcatctttcggcgttagcggggttttctcaccggtcagattcagcgccatgcgctctggcataaaatcttcgacgtggaaatcccacatccgatactgattatcgcccgtgttagcgcgaatatgccacataccggttgccgcattgctatcgagtggccaggtaaagtggtagaggccattctccggctgactaacgacgctcctgagtacctgcccatcgggtttaatcacgtctaacttgatgggttgattgggcaacgctttaccgtctgcatcacgcagcaaaccattgaggattaccgtttcacctgggcgataaagatcgcgtgggccaaacatgaaaaactgtttgctatagcctggcgcgccagcaatgttaaattctgctaagtccagcgccggaagttttaaatcgagtagcgttgtctgaccgtctttacgcgccaacagtaatgccgcgtttttatcattttccagctgcacatgcccctgagcgtcactggttgcctgagtcagagtctgccctttctcatttaataaagagacttcaattccttgctgggccgcgccgttttccagactttgggtaaagatatccagacgattgtgataacggtgagctgaaacgccgatatcacttaacgtaaacagcgtcgcgggattactgtaatcgtaacgtccagcctgattcatcacagccagatacacgcccgcctgctgaagcggtttgatatcgcccagcggcagcaataatttttcacgggtgttacgcgcaggattgagatcaaaccgtccggtgtagaccagatccgccatctgcagcagtttgtctgactgccagttcgccagcgaattgcggtattcccattggctaatgaatgctggcagagattctggcttaacgcggaagaagttaacatcgacattattaacgttgagcgccattaccggcagcccttcaacgactttgccaggcagcagcgaaccacggctggcaaaaccgacgctgggttggatgtcgcgggtagttatagttttttcgtaatctttactgaaggttgcgttgttgagtgctttgacctccttgccaatagtaacgatcaaatcacgtttcggttcgaggtggcgtaaacgtaactctttaagattatctgacagctcccaggcaccatccactttgccgctttttttatcgacgacatgaataacgcgtgagaaatcctgatccgggtcgagagggatggagaacgtcagcaccagcgtggctgcaccatcaagttggacttcagagagatccagcaatgtcagcaccttaccggcactctgttgggccagtttttgtctctccggcacggagagttttgctgaactcgcgttttctgaagaggccgctttagtaacttcagaaggcgcatcttttttcaccgctgttggcgcgttatcgttgttgtcgcaccctgccagcgccagcattagcatgcaggcggctacgcgtaactttttcatttttcatccctgccacaatggcccgttagcaacgtcgaataattattatgcgtgagaatttacgttatgtaattcagtatcacgcccatacaatccgaattttagtgagaattgtggctcagacagccaaatcagcctcttttgcttgtcgcttttcactaaacatccgacaatttagcctaaccccggcaaaaatggagatgcctatgtccacgacatggtttgtaggagccgactggctcgccgaacatattgatgacccggaaattcagattatcgatgcccgcatggcgtcgcctggacaggaggatcgtaacgttgctcaggagtatctgaatggacatattcccggcgcagtgttttttgatatcgaagcgctttctgatcacacttccccgcttccgcacatgctgccgcgcccggaaacgttcgccgtggcgatgcgtgaattaggcgttaaccaggataagcacctgattgtctatgacgaaggtaatcttttctcagccccacgagcatggtggatgctgcgcacctttggtgtagagaaagtgtcgattctggggggtggacttgcaggctggcagcgcgatgatctgctgttagaagaaggtgcagtagagctgccggaaggagagtttaacgccgcgtttaatcctgaagccgtggtgaaagtaaccgatgtattattggcaagccatgaaaatacggcgcaaattattgatgcccgcccggctgcacgttttaacgcagaagttgatgaacctcgcccaggtttacgtcgcggacatattcccggagcactgaatgttccgtggacggaactggtgcgcgaaggcgaactaaaaacgaccgatgaactggatgcgatattttttggtcgcggcgtcagctacgacaaaccaattatcgtcagctgcggctctggtgtaacggcagccgtggttttgttagcactcgcgacgctggatgtgccaaacgtgaaactgtacgacggcgcatggagtgaatggggcgcgcgggcagatttaccggttgagccagtgaaataagtattttacaggcaataaaaaaccgccgaatttggcggttttttattgctagtctggttcgcggcctttccagcaggttgacttgtgttacatgagcaacgcaggtgcttcacagcaaaacaatactcaccagtaactctctttttgtcaagcaaaagagagtaattattgtttatttagcgtattatcgacaccggccctttccgccgtgttcggtaataaaataacctggcttattagtccgaattcagacaaatataaataaatcctgctcaaaattaaaaattctaaccggtaaaagatattacttaaacatgtaaattcactttcctttaaaaaacaaaaaaccgccaaaatcaggcggttttttgttgctggtccggttcgcggcctttccagcaggttgtattaccgtagtaatgcaagcgcgtctcagcggagacaatactcgccagtaactctctttttgtcaagcaaaagagagttattattgttctgttagtgtattatccactgcggccctttccgccgtctcgcaaacgggcgctggctttaggaaaggatgttccgtggccgtaaatgcaggtgtttcacagcgcttgctatcgcggcaatatcgccagtggtgctgtcgtgatgcggtcttcgcatggaccgcacaatgaagatacggtgcttttgtatcgtacttattgtttctggtgcgctgttaaccgaggtaaataataaccggagtctctccggcgacaatttactggtggttaacaaccttcagagcagcaagtaagcccgaatgccgccctttgggcggcatattttagattatccgattctgtttaaagtcacgcaaaaaaccaccccagcgacgttcatagaatggcgcaatatgttcggtaataaagtggctaattcctttttccccttttttcacctgacaaatatcgattggttcatcgccaggtaatgtatcggtcgctacacttcccgtcgcctgaataatttcttcgatatcaccatcggcttcaatgccaataagtaaattaggctgtgcctcttcgttctctttaattgaacaaataaaagcacgcttcaccggcttaatggttttaaataaggtggtgagtgaatcaatcatttgtgctggcggctctgcgacttccgataatatcagcgattcaccgccttccaggatttcctggctgctcagcggatttccctcttcaccaatcaacaaactgatttcacgcggcataaattctttaccggttggcagtttggcattaaggaagagcgtttcgccaagtgtcatctcaaacagcgtgcgaacgggcattacgacaaatgcctgttcgtcttcaaccgcctgttgaagtgcttctaacgaggtgaaaaaaggaatgacgctggtgccgtcttctttttcccagtgctgtaaatcaagcgcgctatcttcaaccacagcctcgccctgcgccgccgtaccaggcacccagacggtggattccagtagagtacggaaaaaggccgggcggtgcgccggttcagttgctgctttttccagcaggtcttcaagttcgttttttgtttcggacataagaaccacaattcattcaacgttcggggcgcaaatgcctgatgcgctacgcttatcaggcctacaagggattcgcaatttgttgaatttgcagaatttgtaggccggataaggcgtttacgccgcatccggcatattagtttacgccgttaacagattagctatcgtgcgcacaccaagtcccgtagcgcccgcagaccactgttcaaccggcgctttacggtaagtcgccgagcagtcgatatgcagccagccttgctgatagttctcaacaaagtgcgacaggaagcccgccgccgtgctcgcgcctgccggatacgccgcgcttccggtattgttcagttcggcaaagttagacggcagctggctgcggtggaactccgccagcggcagacgccagaacggttcgttctcctgcgcggcactcgccagcaagcgaccggccagcgcatcgtcaaaactgaacagcgcgtgataatcattacccagcgcagttttcgccgccccggtgagggtcgccgcatcaatgatcatttccggtttctgcgcactggcatcaatcagaccatcggcaagcaccagacgcccttcggcatcagtgttcatcacttcaacttttttaccgttgcgataggtgatgatatcgcccagcttgaacgcattgccgctaatcaggttatccgcacagcagaggaacagcttcacgcgcttgttcagtccgcgcgtaatggcaaatgccagcgccccggtaaccgttgccgcgccgcccatgtccgacttcatcgagtccataaacgcagtctgtttgatgctgtagccgccggagtcaaaagtgatacctttacctaccaggcacgcgtacactggcgcttctttatcgccagttgggttgtaatccagcgccagcaataccggagaacgttctgaaccgcgtccgactgtgtgcagccccatataaccttgctcacgcagatcttcgcctttggtgatccgataagtcacacgatcgcccgcgacgttgctgatcagatcaacagcacgctgtgccagttgcgatggtcccaattcttctgccggtgcgttgatggtgtcacgcacccagtcgatgatcatcaggcggttatccagttcctggcgctgggcatcgtccagatccggccacaccactttacgcgtgcctttcggggctttgtaaccttgccagaatgcccagcagcgatccgcatcccagccttcaccgcttaactgaacatgcttgatgcccagaccgtcaatcttgcgcgccgcacgctggatcagccccagatcgtctgccccgttcaaatgcagggtaatgccgtcattattaatgctgtaagttgctttttctccccagcgcgcgtcggcaggttgggtagagagggtaatcttcatcgcttctgtcattttagttatccttctttgtaaaagggccgccagttggcagccccaggatttttccgctaaatgattcgcgttgcaggaaggcggcaagtgagtgaagccccaggagcatagataactatgtgactggggtgaacgagcgcagccaacgcatctgcggcgtgaagcatgacgcggaaattattcggcctcgtccagccagactaacaaaatcgcttcgaggattttctcgttggatgcctgcgggtcgtcgtcgaaatcttccagatcgcaaatccactgatgcatatcggtgaatcgaaccgttttcggatcaagatcgggatacgcatcgtacagtgcttcgccaatttcgcggctatcggtccacttaagtcccatactaacctctgttaatgctcacgcgcatggttgatagtgtaacgcgggatttcgactactaaatcttcgtcggtaacgcgcgcctggcagcttaaacggctttccggctccagtccccaggctttgtccagcatgtcgtcttcctgctctgagctttccggcagtgagtcaaaaccttcacgaacgatgcagtggcaggtggtgcaagcacaggatttttcacaggcgtgttcaatctcgataccgttacgcagagctgcgtcgagaatggtttcaccgctattagcttccagaacagcgccatcagggcagagatcctgatgaggcaaaataacaatctttggcatattaaacctcgtccacggaatggcctttcagcgcacgacgaaccgactggtccatgcggcgagcggcgaaatcctgggtttgtttgtctacgtttttaatcgcttgttcgatggcgtcaacatcatcgccctgcgccacttcactcaggtgagcggcagcatcgtcaatgacctgacgttctgcggcgcttaacagcgcggcatcagcagccagcgcgccgtgcagactttccagcacacgcgccgcttctactttttgttctgccagcattcgggcttttacgtcctgctcggcatagctcattgagtctttgatcatcgaagcgatttcgctatcggtcagaccgtaagacggtttgacctgaatagacgcctcaacgccggtggatttctccatcgccgtcacgctcaaaagaccgtcggcatcgacctggaacgtcacgcgaatatgcgcaccgccagccggtagcgccggaataccacgcagcgcaaaacgcgccagtgagcggcagtcctgcaccagttcgcgctcaccctgcattacatggatagacatcgccgtctgaccatctttaaaggtggtgaaatcctgagcgcgggccaccggaatagtggtattacgcggaatcactttctccaccaggccgcccatcgtttcgaggcccagcgacagtgggatcacatcaagcaacagcatttcgctgtctggcttgttacccaccagaatatccgcctgaatcgccgcgccaatagcgacgactttatccgggtcgatggaagtcagcggtggacgaccgaaaaattcgcctacccgttcacgcaccagcggcacgcgagtagaaccgcccaccatcaccacttccagcacttcatcagcttctacacccgcgtctttcagcgcgcgacgacaagccagtaaggttcgttttaccagtggcgcgatcagttcattgaattgttcacggctgatttcgccctgccagcccgcaacgttaacggtcacggagtccgcatcgctcagcgcgattttggctgcaatggcggcatccagcagttcacgctgaacgcggttatcgctacgatcaggaatgcccgcctgctcgcgaatgtaatccgccagcagatggtcgaaatcatcgccgccgagcgcggaatcaccgccggttgccagcacttcaaacacgccgcgacttaagcgcagaatggaaatatcaaacgtcccgccaccgaggtcataaacggcgatcacgccttcctgaccggaatccagcccgtaggcgatagccgcagcggtcggttcgttaagtaagcgcaggacgtgaaggcccgccagacgcgccgcgtctttggtgccctgacgctgggcatcgtcaaagtacgccggaacggtgataactacaccatccagctcgcctgccagggcttcagttgcccgcgccgccagtgctttgaggatgtccgcagaaacgcgcaccgggttcagcagccccgccgccgtttcaatcatcggcaggccgttttcgctggcctggaattgataaggcagatgcggatagcgttgctggatatcagccagcgagcgtcccatcaggcgtttaacagaactaattgtgttggcggtatcgagcgctgcattagtacgcgcgtcataacccaccgaatgcccttgctgttgatagtgaacaacagatggcagcaggtgacggccttcatgatcggctaacgtttcggcctgaccgctgcgcactgtcgccaccagcgagttggttgtgcccaggtcaataccggccgccagacgacgctgatgcggcgcagcactcaaaccaggttcactaatttgtaataaggccatgtttagcttccagaaattaaaaatcgagcagtttttcttcgagttgttcggcactgcttcgcagtttatcgagaaaacgcagcttacgcacggtatccgccgccgcgtcccacgtctcgttgtctaactgttcaaccatcaactgatggcgggtatcaaacatctttttcacacgtttgataaagctttccagccgcgcttcatctttcgcctgttcgatctcgtccagctcttcgcgcagctccaactgttccatcaggaacgcggtgtcgcgcacagtatgctgctcgctggcgagatcaaagccgtgcaaagaaagcaaatattccgcgcgcattaacggatgacgcagcgtttgccaggcctggttaatggttgcagattgctgtacggcggcgagttgttccgcctggcttccgctggcgaatttatcaggatgatactgacgttgtagatcctgaaaacgcaggctcagcgcctgggtatcgagttgatagcgggcaggcaagccaaagagggtgaagtaatccataacattctcagggctgcgatccgccgcgataacggcgaatcaggtaaaacaaaccccacgcgcaggcgaccacggtggggttatcggtatgcgcatcaaacgtggaagctttcgccgcaaccacactcatctttgacgttcgggttggtgaatttaaacccttcgttcaggccttcttttacgaagtccagctgcgtaccgtccagaaattgcaggctcttgccatcgaccacgactttcacgcctttgtcttcaaacacgatgtcttccggcgtcggttcgtcaacaaattccagtacataagccatacctgaacacccggaggttctcacgcccagacgcaggccaaaccctttaccgcggttagccagaaaggtatttactcgcgctgctgcactgtcgctcagtgtaatcgacataaccaaacctcaactcttattttgcttcacgtttgcttttatagtccgcaatggcggctttgatcgcgtcttctgccagaatagaacagtgaattttcaccggcggcagttcaagttcttcagcaatatcggtgtttttgatcgcctgcgcttcgtcgagagacttccctttcacccattcggtgaccagggagctggaagcgatagcggaaccgcagccgtaagttttaaaacgcgcgtcttcaatgataccttcatcgttgactttaatctgcaacttcatcacgtcgccacaggccggtgcccccaccatgccgctgccgacgttctcgtcgttgttgtcaaaggaacccacgttacgcggattctcgtaatggtcgataactttttcgctgtaagccattataaattctcctgattccgataccgattaatgatgagcccattcgatgctgttcagatccacgccctgcttgtacatttcccacagcggagaaaggtcacgcagacgaccgatggatttacgaactaactcgatggtgtagtcgatctcttcttcagtagtaaaacgacctaaagagaaacggatagagctatgtgccagctcgtcgttcagccccagcgcgcgcagcacgtaggacggttcgaggcttgctgacgtacaggcggaacctgaagaaactgcgaggtctttcagcgccataatcagcgactcaccttcaacgtagttgaagctgacgttgagaatgttcggcgcaccgtgttccaggtcaccgttcaggtaaacttcttcgatatctttgatgccgttccacagacggttacgcaggccgcgcagacgttccatctcggtcgccatctcttcttttgcgatgcgataggcctcgcccattccgacgatctggtgaacaggcagagtgccggaacgcataccgcgctcgtgaccgccgccgtgcatttgcgcttcgatgcgtacgcgcggtttacgacgtacatacagcgcaccgatacctttcgggccatagattttgtgaccggagaaagacatcaggtcaactttcaactggctcaggtcgataggcagtttacccacgctctgggttgcatcaacgtgatagataatgccacgagcacggcacatttcgccgatagccgcgatatcctgcaccacgccgatttcgttatttacgtgcatgatggacacgaggatggtgtcgtcacgcatcgctgcttcaagttctttcaggtcgataatgccgttacgctgcggtgccaggtaggtgacttcaaaaccttcgcgctccagctgacggcaggtatccagtaccgctttgtgttcggttttgctggtgatgatgtgcttgccttttttctgataaaagttggctgcacctttgatcgccaggttgtcagattcggttgcaccagaggtaaagacgatttcacgcggatcagcgccgaccagatcggcaatctgattacgggcgatatctaccgcttcttcagcctgccagccgaaacggtgagaacgggaggccgggttaccaaaggttccgtccatcgtcataaactgcatcattttctcggcaacacgcgggtccaccggcgtggttgcggagtagtcgagataaatcggtaatttcattgctctataaactccgtacatcactcaatgcaaggaatcaggctaccggctggatgtacgaccgtgtttacggagtatttagcactccggcctgattctgaattctttttattaagcgcgtaacttaacgtcgatcgcgtcttgtgtgcgggtgcgtggcgcgtcgtgagtatgctgacgaccagacacatccagcacttcctggttattaaccagttcgcctaaagtaatgttgttgagaaaaccggtgagacggtcgctcaaatcacgccacagcgcgtgggtcaggcatttatcgccgccctggcagccgcctttaccctgacaacgggtggcatctacagattcgtcaacggcgctaattacttcgccaacggcgatgctgctggcatctttgcctaacagataaccaccgcctggtccacgtacgctggaaaccagaccatttttacgcagacgggaaaacagttgttccagataagaaagggaaattccctgacgttcggaaatatcagccaacggtaccgggcccgcttcagagttgagcgcaacgtcaagcattgcggtcacggcatagcgccctttagatgtcagtctcatgtcttacttcacctcaaactcgcccctgcccggggttttttattgtaaaagtgggggtattgcatagcagggtcaagtctgacattcccgagtaaattggtcaactatttacttgactgatttagtcgggtatttaaccttcagtgccatttttttatcgtggcgtttgtacctgttgtcggatgcggcgtgaacgccatatccgccctggggttctgtacactgtaggcctgataagacgcattacgcgtcgcatcaggcaacggctgtcggatgcggcgtgaacgccttatccgacctacggttctgttcactgtaggcctgataagacgcattacgcgtcgcatcaggcaacggctgtcggatgcggcgtgaacgccttatccgacctacggttctgttcactgtaggcctgataagacgcattacgcgtcgcatcaggcaacggctgttattcggccttgttacctttattctgctgctcaatagaagccagaatcccgcgcaggatattcaactcctggctttccgggcgcgcacgggtaaacagacggcgcaatttattcatcacctgccccggatggttttcacggataaaaccggttgccagcagcgtttgttccagatgaccataaaaacgctccagatcatcgaccagcggatacggcgtctcttcatgctcgacctgctcgccgttttcctgagttgccagccaggccatgcgcacttcataggcaataacctgaaccgccatcgccaggttcagcgagctgtattccgggttagccgcaatcgcgacatgataatggcatttctgcaactcttcattggtcaagccgacgcgctcgcgaccaaacaccagcgccaccggggtatttgccgcttcagcgacgcttttcaggccgcattcgcgcgggtcgagcatcggccatggcagcgtgcgggaacgtgcgctggtgcccaccaccaggctacaaccggctaacgcttcgtcgagcgtatcgacgatgtgagcattaccaatcacatcgctggcccctgctgccagggcaatcgcctgggagtcgggtttcaccagtggattaaccagccacagattggttaatcccattgttttcatggcacgggcaacagaacccatattgccggtgtgtgacgtctccaccagcacaattcgaatattttgcagcattgtctttcttcatctaaagattattcacgcatcttatcataaaacgaagacagatgccgatctcgctgctatactctgcgccgttttcccgttctttaacatccagtgagagagaccgatgcatccgatgctgaacatcgccgtgcgcgcagcgcgcaaggcgggtaatttaattgccaaaaactatgaaaccccggacgctgtagaagcgagccagaaaggcagtaacgatttcgtgaccaacgtagataaagctgccgaagcggtgattatcgacacgattcgtaaatcttacccacagcacaccatcatcaccgaagaaagcggtgaacttgaaggtactgatcaggatgttcaatgggttatcgatccactggatggcactaccaactttatcaaacgtctgccgcacttcgcggtatctatcgctgttcgtatcaaaggccgcaccgaagttgctgtggtatacgatcctatgcgtaacgaactgttcaccgccactcgcggtcagggcgcacagctgaacggctaccgactgcgcggcagcaccgctcgcgatctcgacggtactattctggcgaccggcttcccgttcaaagcaaaacagtacgccactacctacatcaacatcgtcggcaaactgttcaacgaatgtgcagacttccgtcgtaccggttctgcggcgctggatctggcttacgtcgctgcgggtcgtgttgacggtttctttgaaatcggtctgcgcccgtgggacttcgccgcaggcgagctgctggttcgtgaagcgggcggcatcgtcagcgacttcaccggtggtcataactacatgctgaccggtaacatcgttgctggtaacccgcgcgttgttaaagccatgctggcgaacatgcgtgacgagttaagcgacgctctgaagcgttaatgactcaggcgggtgatatcactcacccgccctcgcctttcaggcgctattccgaaatacttcctcactgctttactttctttcgtcactctcccaccatctttccccgattaatggatgataaagaagtcgcaaggaaaggttatggcactgccagtgaacaaacgcgttcccaaaattctgtttattctctttgttgttgccttctgcgtttatttagtgccgcgcgttgccatcaacttcttctattatcccgacgataaaatttacggtcccgatccctggtcggcggaatccgtcgaatttacggctaaggacggtactcgtctgcaaggctggtttatcccttcttcgacgggccctgctgacaacgccatcgcaaccatcattcatgctcacggcaatgccggaaatatgtccgcccactggccgctggtcagttggttacccgagcgtaatttcaacgtttttatgtttgattatcgcgggtttggtaaatcaaaaggcacgccgtcccaggccggattgctggacgatacgcaaagtgccatcaatgtggtgcgccatcgcagtgatgtaaacccacaacgtctggtgctgttcgggcagagtattggcggggcgaatattctggatgttattggtcggggtgatcgtgaaggcatacgtgcggtgatcctcgactccacatttgcctcttatgcaaccatcgccaaccaaatgatccccggcagtggctacttacttgatgagagttacagcggcgaaaattatatcgccagcgtcagcccgatcccgcttttactcattcacggtaaagctgatcacgttatcccatggcagcacagcgaaaagttgtatagcctggcaaaagagccaaaacggttgatcctaatcccggatggcgaacacattgatgctttttccgatcgtcacggcgatgtttatcgcgaacagatggtggactttatccttagcgcgttgaatccgcagaactaacccatgatcgctagcacgataatcattcacaaaaccaccttaagacatgctaatccactggtcagaacagtttaagatgagaaaaattctgtgacgcttgccaacatttctgatgattagcattcccttcgccatttccttgagcaaactttagctattcttatcaattatgcttatgggagatctacagatgatgcctacgcttgctccaccatctgtcctttcggctccccagcgccgctgccagatcttgctgacgctctttcagccggggttgaccgccaccatggcaaccttcagcgagcttaatggtgtggatgatgatattgccagtcttgatatcagcgaaacaggacgggagatcctgcgctatcatcaactcacactgacgactggttatgacggtagctaccgggttgaaggtacagtgcttaaccaacgtttgtgtttatttcactggctacgacgtggtttccgtctgtgtccgtcatttattaccagccaattcacccccgccctgaagagtgaactgaagcggcgcggaattgcgcgtaacttttacgacgataccaatctacaagcgttagtgaatctctgctcccgacggctgcaaaaacgctttgaatcgcgcgatattcatttcctgtgtctgtatctgcaatattgtttgctgcagcaccacgctggaattacgcctcagtttaatccgctccaacgtcgctgggcggaatcctgccttgaatttcaggtagcgcaggaaattggacgccactggcagcgtcgggcgctccagcctgtaccacctgatgagccactgtttatggcactacttttttccatgttgcgggttcccgatccattgcgggatgcgcatcagcgggacagacaattgcgtcagtctatcaaacgtctggtaaaccattttcgtgagctgggaaatgttcgtttttatgatgaacaggggttatgtgatcagctttatacccacctcgcccaggcgttaaatcgcagtttgtttgccatcggtattgataataccctgccggaagagttcgccagactgtacccacgcctggtgcgcaccacccgcgcggcgctggccggatttgaaagtgaatacggcgtccatctttctgatgaggaaagtggtctggtcgcggtgattttcggtgcctggctaatgcaggaaaacgatctgcatgaaaaacagattattcttcttaccgggaatgatagcgagcgagaagcgcagattgagcagcagttacgcgaactaacgttactgccgctcaacattaagcatatgtcggtaaaggcatttttgcagacaggcgctccgcgtggcgcggcactgattattgcgccttataccatgccattaccgctcttttcaccaccgctgatctatacggacctgacgctgacaacacatcaacaggagcagatccgcaaaatgctcgaatcagcatgagggaacaactttcgggcgcaaaaacattgccggaagcgccaccagcgccattacccagaacacgccgtggcccagatattgatacaggaaaccggcgaaaacggtcatgatagcgatactgccgcccatcgcgacggcagagtaaaccgcctgtaaacggatgacttcgctaccctggcgagcagcaatataacgcatggcggccaggtggcagaccgtgaaggtgccgcaatgcagaatttgcaccactatcaaccacggcaacgccgtagttgctcccataatgccccagcgcactacgccgcaaatcgccgagatcaacagcatatcgcgtgcactacaacggcggaaaagtttattactcagcgcaaagataatgacttccgccaccacgcccagcgaccacaaataccccaccgccgaggccgagtagccagctgcctgccagtaaatggcgctaaaaccgtaataggccgcatgtgccccctgcaataaacaaacgcaggccagaaagcgccagttctggcgaaccagcgccaaccacgcagaccaaccggtgctctcctgctggcgacttgccccttgtggctgaatcgtcggacggatgagaaagccgagcagcatggatgccacgcccaacgtcaacagcgcgaggatcacccgataatcaaacatagtgaccagtttgcccgtcagcgccgagccaatgacaaacgccaccgagccccacagtcgcactttgccgtaatcaagcgggaactgcttttgccacgtattcgccagtgcatcggtcaacggtaccagtggtgagaaaaagaggttaaagccaatcatcaccagcatcagccacgctacgtgcgcccccgcccagaaggcgacagcaaagagaagtgtcagcagtgccagcacgcgcaaggcggaaatcaggcgggaaggatcgctgacgcggggcgcgatgagcaaactcccgaggaaacgggcaaccagacctgcccccaataacaggccgatggtttctggcgttaaaccaatccctttaagccagacgctccagaaaggtagaaaaatgccgtaactaaaaaagtatgtgaaatagccgagcgccaaccagcgcgtggattgcaaaaccatgagtccctcccgtcaggaggcgttagtctggggttaatcgaatgttggtgcaagttgaaaaataagaatattcgagcctgcttcccgatgtctgtaacgccagttcacaagcactaaaaaactgagatccgcgacgcatgttgcaaaaataatgcgtaattatgccgttacgcttgccaaacgttcctgcacaatggcgatgaaatcgcgtaatgccggcttcatctcccctttcttccacgccatcagtaaagcaatggaaggcacatttccggcaatgggacgaaaaacaacctgtccggtattaaaattattcatataaccgggtatcaaagtgacgcccagccccatgcccaccagattcatggtcaccagaatattcgttgccacctggacgatatttggctggctgttttcttgcgcaaaccacgctttaacgatcggcgcaagcgaaccggaatacaccggatcggtactgacgaaattcacgccatccagttgcgcggcggtgatctctttttcatgtgctaaagggtgatcaaccggtaacacaaccactaatggttcgtcaaaaagctccagataatcaatctccgggctataaacaggatggcgcattaagccgacgtcgagttcaccacggcgaattttttcctcctgttgcgtggtgattaaactcaccagctcaatcaaggtgtctggctgtctgagacgaaacatcggtaatacttttggcagtaaattcacttccgccgatggcacaaagccaatggttaattgtctgtcttcctgaacaattttccgcgcccgtaatttggcattttccgcttgttcgaggattgccagcgcgtcctggagaaaacattctcccgccgccgtcaacgcgactttgcgcttatccctcaccagtaacggaacaccgacacagttttcaagatcgcggatctggctgcttaacgaaggctgtgaggtatgcagtttttccgccgcacgggtaaagttcagtgcctgcgccactgcgacgaaatagcgtaaatgccgtagttccatcaccttccccttgttatcgaaaaaacgtctcagctggtagaaattaactatttcacatattagcaaccaaccagcaacatccttatggcacaaaaatagaaggtcaatacatcttatctttcaggattaaaaaatatgaccacaccctcagatttgaacatttaccaactgattgacacccaaaatggtcgggtcactccgcgtatttataccgacccggatatttaccaactggagcttgagcgtattttcggtcgttgctggctatttctcgcccacgaaagccagatcccaaaacccggtgatttctttaacacctacatgggagaagatgcggttgtcgtagtgcgtcagaaagacggcagcatcaaggcgtttctcaaccaatgccgccaccgggccatgcgtgtgagttatgcagattgcggcaacactcgcgcctttacctgcccgtatcacggctggtcttatggcattaacggcgagttgatcgatgtaccgctggaacctcgcgcctacccacaagggttgtgtaaatcccactggggactaaacgaagttccttgtgtggagagttataaagggctaatttttggcaactgggataccagcgcaccgggcctgcgtgattacctgggtgacattgcctggtatctggatggcatgctggatcgtcgcgaaggcggcaccgaaattgtcggcggcgtacaaaagtgggtgatcaactgtaactggaaattcccggcagagcagttcgccagtgaccagtatcatgctctgttcagccatgcttctgccgttcaggtattaggggcgaaagatgatggcagcgataagcgcctcggtgatggacaaaccgcccgcccggtgtgggaaaccgccaaagatgcgctgcaatttggtcaggacggtcacggtagcggtttcttctttactgaaaaaccggatgctaatgtctgggtcgatggcgcagtttcaagctattaccgcgaaacctatgccgaagcagaacaacgtttaggtgaagttcgcgccctgcgcctggcgggtcataacaatattttccccacgctttcatggctaaacggcactgccacactccgcgtctggcatccgcgcggccctgatcaagttgaagtgtgggcgttctgtattactgacaaagccgcctccgatgaagttaaagccgcttttgaaaacagcgccactcgtgcttttggtcctgctggttttctcgagcaggatgactcggagaactggtgtgaaatccagaaattgcttaaaggccaccgcgcccgcaacagcaaactgtgtctggaaatggggcttggtcaggaaaagcgccgcgacgacggcattcctggcattactaactatatcttttcagaaactgccgctcgtggaatgtaccaacgctgggccgatcttctgagtagcgaaagctggcaggaagtgctcgataaaaccgccgcttaccagcaggaggtgatgaaatgagtgcgcaagtttcactagagttacatcaccgcattagccagtttctctttcacgaagccagcttactggacgactggaaatttcgtgactggctggcgcagctcgacgaagagattcgttacaccatgcgcaccacagttaacgcgcaaacacgcgaccgccgcaaaggcgtccagccaccgacaacctggatttttaatgacaccaaagaccagctggagcggcgaatcgcccgtctggaaacgggcatggcctgggcagaagagccgccgtcacgcacccgtcacttaatcagcaactgccagataagcgaaaccgacatcccaaacgtatttgctgtgcgggtaaattatctgctttatcgggcacaaaaagagcgcgatgaaacattctatgttggaacgcgtttcgacaaagttcgccgtctggaagatgacaactggcgcttgctggaacgggatatcgtcctggatcaagcggtaatcacttcccataacctgagtgtactgttctgatgaatcgaatttatgcgtgtcccgttgcggatgtgccggagggtgaggctctccggatcgatacctcgcccgtcatcgccctgttcaacgttggcggcgagttttatgccattaacgatcgttgcagccatggtaatgcgtcaatgtcagaagggtatctggaagatgacgccacggtggagtgcccgctacacgccgccagtttttgcctgaaaacggggaaagcgttatgcctgcccgccaccgatccgctcaccacttatccagtacacgttgaaggtggtgacattttcatcgacttaccggaggcgcagccatgagcgatctgcataacgagtccatttttattaccggcggcggatcgggattagggctggcgctggtcgagcgatttatcgaagaaggcgcgcaggttgccacgctggaactgtcggcggcaaaagtcgccagtctgcgtcagcgatttggcgaacatattctggcggtggaaggtaacgtgacctgttatgccgattatcaacgcgcggtcgatcagatcctgactcgttccggcaagctggattgttttatcggcaatgcaggcatctgggatcacaatgcctcactggttaatactcccgcagagacgctcgaaaccggcttccacgagctgtttaacgtcaatgttctcggttacctgctgggcgcaaaagcctgcgctccggcgttaatcgccagtgaaggcagcatgattttcacactgtcaaatgccgcctggtatcctggcggcggtggcccgctgtacaccgccagtaaacatgccgcaaccggacttattcgccaactggcttatgaactggcaccgaaagtgcgggtgaatggcgtcggcccgtgtggtatggccagcgacctgcgcggcccacaggcgctcgggcaaagtgaaacctcgataatgcagtctctgacgccggagaaaattgccgccattttaccgctgcaatttttcccgcaaccggcggattttacggggccgtatgtgatgttgacatcgcggcgcaataatcgcgcattaagcggtgtgatgatcaacgctgatgcgggtttagcgattcgcggcattcgccacgtagcggctgggctggatctttaaggaagcacgatgaaagaaaaaacgatcattattgtcggtggcgggcaagcggcggcaatggctgcggcctcgctacgccagcaagggttcaccggtgagctgcatctgttttccgatgagcgacatcttccttatgaacgacctccactctcgaaatccatgttgctggaagattccccgcagttacagcaggtgttacccgctaactggtggcaggaaaacaatgttcatctgcattccggtgtaaccatcaaaacgctgggtcgcgacacacgagagttagtgttaaccaacggcgaaagctggcactgggatcagctttttatagcaaccggcgcggcagctcgaccgctgccgttgcttgatgcactgggagaacgctgctttaccctacgccatgccggtgatgccgccagactgcgagaagttctgcagcccgaacggtcagtcgtgattatcggtgccggaactattggtctggaactggctgccagcgccacgcagcgcagatgtaaggtgacagtgattgaactggcggcaaccgtcatgggccgtaatgcaccaccgcccgtgcaacgctatcttttacagcgccaccagcaggctggtgtgcgcattctgctcaataatgccattgaacatgtggtcgatggtgaaaaagtagaactgacgctgcaaagtggggaaacgcttcaggctgatgtggtgatttacggtattggtatcagcgccaacgagcaactggctcgcgaggccaaccttgatactgccaatggcattgtcattgatgaggcttgccgcacctgcgatcccgcgatctttgccggtggcgatgtggcaatcactcgtcttgataatggtgcactacaccgctgcgaaagctgggaaaacgccaataaccaggcgcaaattgccgctgccgcaatgttagggctaccgctaccgctactgccgccgccgtggttctggagcgatcagtacagtgataacttacagtttattggcgatatgcgtggcgatgactggctttgtcgtggcaacccggaaactcagaaggcgatttggtttaatctgcaaaacggcgtgcttatcggtgcggtcacgctgaatcaggggcgtgagattcgcccaattcgcaaatggatccagagcggcaaaacgtttgatgcgaaactgctgatagatgagaacatcgcgcttaaatcactgtaaccaggataattagcgaatatctcaatgcctggggcgtggcgaggtgcaagagtgtgtattacgtttaaatcacattatcttgcaaagggattggttatgaacacactacgttattttgattttggagctgcccgccccgttttgttattaattgcccgtatcgccgtggtcttaattttcattatttttggttttcccaaaatgatgggctttgacggtacggtccaatatatggcctcgttgggcgcgccaatgccgatgctggcagcgattattgcggtagttatggaagtgcccgccgcgatattaatcgtgcttggctttttcacccgtccgctggcggtgctgtttattttctacacgctgggtacggcggtgattggtcaccattactgggatatgaccggcgatgcggttgggccaaatatgattaatttctggaagaatgtcagtatcgctggcgcgttcttgctattggcaattaccgggccgggggcaatttctctcgatcggcgttaggaaagatgccggatgcggcgtgaacgccttatccggcatttaataaattacagccactctacccgcaacgacatctctgaagttgttgattcccctggtgctagcgcaatgagatcacccccttccgggcgatgatgatcatccggcgcatggctcatcggttccagacagaagaaatcaaacgcatatcctttatcaaacgcagggtcggaaacaaagatgaaataacacggtgcaggtggcgtcgtttccatgatgatggcataaccttcctgcggctgctcgatgcgggcctgaccattccatccggcaaaaccattgttcacccactggcgcggcaacggcgcgggctggttaaaatccagttcctgcggtagctgctcgcaaaactcacccgccagccactgctcccgctccagccagtaaccgctcgcctgtgcctgaatccgcgtttgcggcgacaacggaaaataaggatgccagccggtaccaaatggcagcgtctctgccccttgattggtgacagagagcgtcaccgtcagcgtatccgccgttaaatgaaacgcctgacttacccgatagtgatagacaccgctgcgatgttcatacaccagacacaaactatcatcgctgtgcgagacacattgccactcgcccagccagccatcgccgtgtagatagtgcgcatcccactcaacattcggttgcagttgatactcacgcccctgccagacaaaacgattgccgctcacccggtttgcaaatggcaccagcggaaaacatgaggcatcggttgccacaccgctttttttaccaggacgtaagagcggcgtcgtatcgcgccagaagccttcgattacgccgccctggtcagaaacgtccagctttagcgacccgtgggataaggtatagatggtcatccgctaactccttaatccgggaagttaatcacaactttcccgcatttgccgctcgccatcagcgcataggcatcacctgcctgttccagcgagaagcgatgggtaatggcgttacgcggccacagcttccagtccgtcagatcatgggcgcatttttccatatggaacagactggtcacccaggagccgataatccgccgttgatggtgcatcagatcggcgctgacctcgaattccacttttccggtttcaccaatgtaaaccacccgtccccagtcagcggtggattgcagtgccagcaagcgacctgcggcattaccggaacaatcgagcgcaacatccgcgccaccgtgggtgagttcggcgataatctgcggcagaccttcggtggttgctaaatagccgtgatccatcacccctaactgttttgccatcgccagacgttccggcagcatatcaacgccgatgatccgttttgcaccgcgacctttcgccagcatcatcgccatcatgccgactggccccagaccgaccaccagcacgttatcactgccggaaacttcgccgcgcaaaattccttcatacgctgtaccaacgccgcaactgataaacgcaccatcttcgtagctcagcgcatccggcaggaggatcagatctttttcttccgccagcaagtattcggcatgaccgccgtcacgctgccagccgtaagccgcttttccttcgccagtacaagaaataggaaaaccgcgacggcagttcgggcaaaaaccacagccagaaatgtgatacaccagcacgcggtcgccctctttaaaatggcggcagccttgccccatcgccacaatctgcccgcacggttcatgaccgttgataaagccctggtataacggtttatcgggtgccgccgctgtggcacggtgttgatgatagatatagtggacatcgcttccgcaaatcccggaggatttcattttgatcagtacctggttaatccccggcgtcggcaccgcaacttcccgcagatcgacggtcgaatttcctggtaaataagctgccagcatcgttttcataaatccctcattaacaatacgattaattttcatccctgccgcacccgcgccaggggcgttaaggtttagcgtttcgctttactgcttcgctgggtcagcaagatattcgccagcaccgccaccacgatgatgacgccgcgtaccacctgctggaaaaaggagttaataccgagcagcaccagaccgttaccgattagcgtaatcaccagcacaccaagcaatgtaccgaacagggaaccgcgaccgccggaaagtgccgtaccgccgaccacgaccgcggcgatgacgtcaaactccagaccgtttgcggcacctgcgttaccagaaccgaggcgcgccgccaacaaaatgccggtcaccgccgctaataatcccgaaagggtaaagataagaatgcgcacccgacgaacgttgatgccgcacaactgcgccgccgtagcattaccgccaacggcaaaaaccgagcgcccgaaggcggttttgcggctgatgaacacaaacagcgcaaacaacacaatcatgatcagcgcggataccggcacaccgagaaattgtccgcccagccagtccagcacctcgttttcatcaatcggcactggcagtgcgttcgtcataaacagccccattccgcgcagggcgctccacagccccagtgtggcaacgaaacttggtacattaaacacgccgcgcagcaccccggccagcgttcccatcagcgcgcctaacagcaacaccagcaggcacgccaccgccagcggaacttcaaattgcagcaaaaatgccaggcacaccgagacaaaagccaccatcggcccaacgctgacatcaatttcaccggagataataatcagcgtcatcgcccaggcggcaatcccaatggtggcggcatcgcgcagcacgttcatctggttattcaatgagataaagccaggcgcgttcagggagaagaccagataaagaatggcaatcaccaccagcaaaccgatctcattaatatggcgactgacaaattgtttgagcgagacgctcttgccctgcggcaatggtaatgacgaagcagacatcttcaggttcctcggtaaaattcatcagtgcacagacagaatggcggacatcagctcatccacattgaccggagcgtgaaactcctgcgagaacgtgccgtgctgtaataacaggatgcggtcacacaccagcggcaactcctccacttcactggagataaacaccacgctttttccttcggcagccagctcacggacaatacggtaaatctgctgtttggcttcgatatcgacgccgcgcgttggctcgtcgagcaacaaaatctggctggcagcatagacccaacgaccgatcaccactttttgctgattgccaccagaaagcgtgccgatgggtgtttcgctactggcggccttgaccgtcatccgctgcatcacctcttcggtcaggcggcggatggtggaccattgcagcacaccgttggcgctgattttttgccgattggtcagcactgtattttcgtcaacgcccaaccagggaatgatccccgcttctttgcggttttctggcgtatagccaatgccgcgtttcagcatgtcgccgtaatcggggcgcgtgattttctcgccgttgataacaatttcgccctgttcatactcctccagcccaacaatcgccttcagcaattcactgcgccctgcccccagcagaccagcaatgccgagcacttcgccacgacgtagcgtaaaactgatatcctccagcttgggcttatggcgtaacgcacggacttccagcacggcctgatccacaatttcctgaggggctaccggcgcaatatcaacgtgatcgcgcccgagcatcagcgacacaatatgatgcgtggaggtgttttcgagcatcacatcgcccgccacctgaccatcgcgcataacggtggcacaggaggcaatgcggcgaatttcttccatccggtggctgacataaatcaccgccacgcccagtgccgacatctttttcaccgcgctgatcaccagttcaacttccgcactcgcaagcgaactggtaggttcatcaagaatgaccacgcgcggctcgcccttcatcacccgcgcaatttccaccagctgcttttgcgccgggcttagcgttgaaacaagttgttcaggactaacgtcaacgcccagcgcctgtaagcaacgttgggcatcctgcgccatttgcaggtaatcaatcatgccgttgcggcggggccactgaccgaggcagaggttttccgccactgtcagcccttccaccagacttaactcctgataaaccgcgcgcacccccagttcagcggcacggcgagtcagcgtagcttcgtcaccttccagtcgcgtctcgccaatccagatatcaccgctatccgggcgttcgctgccggtaagcattcgaatgagagtcgatttgcccgcgccgtttttacctaacagcgcacgaacttcgcctttattgagcgtgaagttaacgttatccagcgcaacgacgccgggataacgcttatttcctgccaccacttttgctaccgggactgcctctgttgccgtgaacatagggacctctgcgaatcagcgattagggcagaccatcaacgtgcgttgccagccactgtttaccgtcttccgttttggtatagagatcgataggcacctgaatcactttttcaccgtcggcttgtttattgataaccttcaatgtttgcgcgaaaacagcattgcccattttcttaccggaaatatccactaccgctttcagcacctgattgttttccagctcctgagcaatttcggttgtcatatccgaaccgaaaacagcaatttttccggcctgattttgattacgtaccgcttttaccgcgccgagtgtcgcaccgcccgattcccccataatggcgttgagatccggcgtggagataattagtttttcaccaacggaaatcgctttatctaaaacagtcccttcctgattagcgacaatttgcgcgccgggaacgcgggattttaaaacttcttcaaatcctttacgtcgctgcacacaaacttcaaaggcttcgcaattgatgacggcaattttcggctggtcaattttattggcaataaaataatcagcggcagcgttacccagttttttaccaaattccagcggatcgccgaccagatacgccgagacatatttatcgacccccttttgattaatacaggtgttgtagcaaatcaccggaatgcccgcttcactggcgcgacgaacggtacggctactgccattttcagacactgccgataaaataatggcatcgacattacgcgccacgagggtatcaacaaaggtactttctttcgaaatatcaccctgggcgttagtttctattaactgaacttgtactgaggaatcttttgccgcatcctgaacgccctgacgcactccagcgtagtatccctgagtatcaaggtatattgcgccaatggtcatttctttttccgcagccctggcaaatagtgcgctacctaatagcgtagccattaataatagattacgggttgttctcatttttgtaggcatagagcctcctgtagggtttttattaacaacggcttattctaattattttgtgatgagcggcagcgcgtgccgctcaaatattacagttaatagggtttagtgaacgcggttaaaaataaaaggcatcacggtggtgaataatgccgctttcggccaagccggattaatcgccgtcaattcagcgcgagcagactcatattgcgcaacctccccgagtcccgcggacgccagcatcgccaccatcaggcatttttctttatgctgctgttgtaaatcgccatacagcgacaacaagtcaggttgcgagacggcaaagaaatccgcttcgatactggttttcgccatctcttgcgcccactgtttcatttcactaaacagttgctgtgcggtttgttgttcgcccagcagtcgcagcgccatcccttgccagaagagataatcaaccggctgatcgttgtaataactgtgaatgttaatagtgcgatcgccggtcgccgccagacgtaaacaacgcgtcgcttcagtttcatcgccctgcgcgttggcgcatatcgcctgccagaaccagatgtcgttatcagtttgccccggtaaacggccttcgcttaaattctccggataatgcagcgcggcatgaagcagttcgcaggcctgctgcggctgtctggcatcaagatgctgccaggcgcgtaataactggttgaggataaactgactggtgaccttcccttccccgccttcccacgggtggaatttgcgcgtggcgagaatgtccgccgctttgtctgcctgacccgtgagatgccacaaattgagcagttctgcggtcatgtcgtcgcgtttcagcgcaatttccagattattttccagacgcgccagtcgtttctccggtgtggctccacttaacttatccagcaaatcccgttcgaaaagcagacgtgcatcctgcggcgcaagctgataagcattatcaagataacgcgcggccagctcataatcgtgttgcttattccacgcatggatcgctaacccgcgccagccgtcggcaaactccggcgacatctctacgcaacgttgccaaaaggcaatggctttgttgtagctacgtttgttgtagtagaagcaagctagtaaatggcgagcaaaccagcactcttcaatactctccagcgccgccacttcttccagcgtattcgggaaacggacaaactgcgggaagacatcaatggcttttgcgaccagttcgccacgttcggctttcggcagcaagctggcttgcaggtaaagcggcagcgtgcgctggcagtccagtgcgttcagcatctctgccgccagggtgggcattccccagttaatcagttgcccggcggtcatcagggcgttaacgtcgcgtccctgacacagaccgcgccactgcgcgagagctgattcgctacgaccatcgaaccagttcagccaccacagagtggcgttcagcggataatcgcgcagcagtttctcgcgctgcacacgcgcgttgtcctgacgaccacttaacaccagcagcagattatgcaggcaaagcacttcctgattggttgggcaggcgcgaagactttgttggcaaaaatccagaccagcgtcgaagttaccattacgcgccgccagtcgtgccaggccataatagccaccggctttgctgttgccgctccagaccgcacgccagaaatcctcttcggcttgttgatattgtccctgacgttcgtaagcactggcgcgaatcaaactcgcctgtccgcactgcggatttttgttcagcgcatgtgcgcgtttcagagcctgagtggcatacgccaccgcttgcgggaaatctgcgcggttatattccagcatcgccagcgccaggttacagcgataatccagcgggtccagcgccacgccgcgcaggtagtaatcgaacggtgaacggctggcgtgatgatattgctccagatgctgaccgataaaccaggcttcatctgtactggtaatgtcttgtgctgccagtggcgctttggcgacgtccggtaacggcaacgcttgcggctgatgttcctgataactcagtacaatattgccgtcggcatcggagagctcaatggtcagcctttcaggattgataccgtgcaacacgccctggatggcggtcgcaggcatcagtgccacggcatcatcaagtaacgcgttgcatttaccgatttcgcggatcgccaggcggtatccgttcaacggagagatggcatacagcccccactcaatcccccgcttactacgctggagttttatcaccgcatcgcgggaggcattttgcaccatgcccaaagaatgataaggcaggaaatactgctcaaaacgcttctcttcgtaagcatcaagccaggtaaaatcgggctggttatcggcaaaaataccggtcatcagttcgatatacgggccgttattgtcggtcagactcttatcccacgcctggccaaattcactgtgtccccaactccactgttttttacctggcgcaatatggtggttggcaacgtgcagcaaaccgccatcttcatcgtgacaccacgcgccgacaaaatcgtactgcgatttttcggccatatatgaggttggaacaggcacatttttatagcgagaaatgtccactccagcggagtagtccactttgtagtaagtgccggtagcgatggggaaagcggagacggcccgtttgccgtgatcaaacaccgccgttacatccggcgggaagacgctctgatgcccttccccccctttcactgccgggttggcccaccacaagaaatgacgcggcgtggcgttcccgttatagacgcggctggcgatttccagcgccgcccggtcagggcgcagggtgaaacctgtcatcacctgtaaaccatgcatcggctccgtttcgcctacccacaccgtctgtgcaccgtcttcatgggcttcgagggtgaaatcaacgggcataaaggtggtcgggcgatgatgttgcggccagttaaactcaatcccaccggaaatccacggccccagcagccccaccagcgcaggtttaatgacttcattgtgataaacaaaatcgcgctgtttcactttatcccacgcgcgatgcacccgaccgcccagttccggcaggatcatcactttgatgtagtcgttttccagccacaccgcctgccaggatttcagggttttctgctcgctcagcgtatcggtcacgccgtagggataaaccgcgccggacgatccctgataaacgcgattttccaggaacatgggatgtatatcctgcggcccggtttcataggtcgggatctcaacgcgctcttgccacacttttactggagtcatggtgccctcaatattaacaagacatactgaattaaaagatttgtggcagtgtattgaacaatctggcaatgttttcgcggaataatcacgcaattaactaaacaaggtttagtgaagatgagagcctgcattaataatcaacagattcgccaccataacaaatgcgtgattctggaactgctgtaccggcaaaagcgcgccaataaatcaacgctggcccggctggcgcaaatttcgattccggcagtcagtaatattttgcaggaactggaaagcgaaaaacgggtggtgaatattgacgatgaaagccagacgcgcgggcatagtagcggtacatggctgattgcgccggaaggtgactggacgctgtgcctgaacgtgacgcccaccagtattgagtgtcaggttgctaatgcttgtttaagtccgaaaggtgaatttgagtatttacagattgatgcaccgacgccgcaggcgctgctgtccgaaatcgaaaaatgctggcatcgccaccgtaaattgtggccggaccataccatcaacctggcgttggcaatccacggtcaggttgatcctgtgaccggcgtgtcgcaaaccatgccgcaagcgccgtggacaacgccggtggaggtgaaatatctgctggaagagaagctcggcattcgggtgatggtcgataatgactgcgtgatgctggcgctggcggagaaatggcaaaataattcgcaggaacgggatttctgcgtgatcaacgttgattacggcattggctcgtcgttcgtgattaacgagcaaatttatcgcggcagtttgtatggtagcggacagattggtcacaccatcgttaatccggatggcgtcgtctgcgactgtggacgttatggctgcctggaaactgtcgcctcgttaagcgcattaaaaaaacaggcgcgggtatggctaaaatcacaaccggttagtactcaacttgatcctgaaaaactgactacagcgcagttaatcgctgcctggcaaagtggagaaccgtggatcaccagctgggttgatcgctctgccaatgccattggtttgagtctgtataacttcctcaacatcctcaatattaatcagatttggttgtacggtcgcagttgtgcctttggtgagaactggcttaatactattattcgccagacaggatttaacccgttcgaccgcgacgaaggaccgagcgtgaaagcgacgcaaattggctttgggcaattaagccgcgcacaacaggtgctgggaattggctatttgtatgttgaggcgcagttacgacagatttgatggcgcgataacgtagaaaggcttcccgaaggaagccttgatgatcataaacgaaaaattgcctgatgcgctacgcttatcaggcctacacggagattgcaatatattgaatttgcaaagttttgtaggccggataaggcgttcacgccgcatccggcatgaacaacgagcacattgacagcaaatcaccgtttcgcttatgcgtaaaccgggtaacgtgcgcagatgtcgagaactttacctttgatgcgctcgataacggcttcatcattgatgctgtccagcacgtcacacatccagccagccagttctttcgcttcggcttctttaaagccgcgacgggtaatcgccggagtacctacacgaataccggaggtcacaaacgggctcttcggatcgttcggtacgctgtttttgttgacggtgatgttagcacggcccagagcggcgtctgcttctttaccggtcaggtttttatcaaccagatcaaccaggaacaggtggttatcagtgccgccggaaaccactttgtagccgcgctcgaggaacacttctaccatcgctttagcgtttttagcgacctgctgctggtaagttttgaactcaggctccatcgcttctttcagagcaaccgctttaccggcgattacgtgcatcaacggaccgccctgaccaccagggaaaacggcagagttcagttttttgtacagctcttcgctaccacctttcgccaggatcaggccgccgcgcggacccgccagggttttgtgagtggtggtagtaacaacgtgagcatgaggaaccgggttcgggtagacgccagcagcaaccaggcccgcaacgtgcgccatatcaacgaacaggtaagcaccgatgctgtcagcgatttcacgcattttcgcccagtccaccacgccggaatatgcagagaaaccaccgataatcattttcggcttgtgttctttggcttgtttttccagatcggcgtagtcgatatgaccggtagcatcgataccgtaaggaacgatgttgtacagtttaccggagaagttaaccggagaaccgtgagtcaggtgaccgccatgcgccaggttcatacccagaacggtatcacctggttccagcagcgcggtgtagaccgcaaagttagcctgggagccggagtgcggctggacgttagcgtagtcagcgccgaacagttctttcgcacgatcgatcgccagttgttcaacgatatcaacatactcgcaaccgccgtagtagcgtttgcccggataaccttcagcatatttgttggtcagctgagaaccctgcgcctgcattacgcgcgggctggtgtagttttcggaggcgatcagttcgatgtgctcttcctgacgtactttttcctgctccatagcctgccacagttcggcatcataatcggcaatgttcatttcacgctttaacatccgcatctcctgactcagctaacaataaaatttttggcctttataggcggtcctgttggacaacggcgaacagtataaccgaatcattgtgcgataacaggtcttgacaaaggaatttacgcaaacgattaccttcaggctacgcaaggctttggagaataaagagcttgcaaccggaaacggatttcttttcaggtttgtgatgcaaatttttcacttcatcacattctttctgaaaaacaccaaagaaccatttacattgcagggctattttttataagatgcatttgagatacatcaattaagatgcaaaaaaaggaagaccatatgcttgacgctcaaaccatcgctacagtaaaagccaccatccctttactggtggaaacggggccaaagttaaccgcccatttctacgaccgtatgtttactcataacccagaactcaaagaaatttttaacatgagtaaccagcgtaatggcgatcaacgtgaagccctgtttaacgctattgccgcctacgccagtaatattgaaaacctgcctgcgctgctgccagcggtagaaaaaatcgcgcagaagcacaccagcttccagatcaaaccggaacagtacaacatcgtcggtgaacacctgttggcaacgctggacgaaatgttcagcccggggcaggaagtgctggacgcgtggggtaaagcctatggtgtactggctaatgtatttatcaatcgcgaggcggaaatctataacgaaaacgccagcaaagccggtggttgggaaggtactcgcgatttccgcattgtggctaaaacaccgcgcagcgcgcttatcaccagcttcgaactggagccggtcgacggtggcgcagtggcagaataccgtccggggcaatatctcggcgtctggctgaagccggaaggtttcccacatcaggaaattcgtcagtactctttgactcgcaaaccggatggcaaaggctatcgtattgcggtgaaacgcgaagagggtgggcaggtatccaactggttgcacaatcacgccaatgttggcgatgtcgtgaaactggtcgctccggcaggtgatttctttatggctgtcgcagatgacacaccagtgacgttaatctctgccggtgttggtcaaacgccaatgctggcaatgctcgacacgctggcaaaagcaggccacacagcacaagtgaactggttccatgcggcagaaaatggcgatgttcacgcctttgccgatgaagttaaggaactggggcagtcactgccgcgctttaccgcgcacacctggtatcgtcagccgagcgaagccgatcgcgctaaaggtcagtttgatagcgaaggtctgatggatttgagcaaactggaaggtgcgttcagcgatccgacaatgcagttctatctctgcggcccggttggcttcatgcagtttaccgcgaaacagttagtggatctgggcgtgaagcaggaaaacattcattacgaatgctttggcccgcataaggtgctgtaatttgatgttgccggatggaaacatccggcaacccttgacgcggtttaaattgccgcgtcgtcctcttcaccggtacggatgcgaatgacccgtgccacgtcaaagacgaagattttaccgtcaccgattttgccggtttgcgccgtgcgaataatggtatcgacacaggtatcgacaatgtcgtccggtacgacaatctcaattttcactttcggcagaaaatccaccatatactccgcgccgcggtacagctcggtatggcctttctggcgaccaaagcctttcacttcggtcaccgtcatgccggtaataccgacttcggccagtgcttcgcggacatcgtccagcttgaagggttttataatcgcatcaatctttttcatgctattccttgaaaaggtcgcctgtcttttgatctgctaaacgtaacacataacgccaattcattccttgaaatcgtttgcatccagctcgtgtcgggaaagcagtttataaaattctgtccggttgcgccccgccattctcgccgcgtgggtgacgttgcctttggtgatttgcagcagcttacgcaaatagttgagttcaaactgattacgtgcctcaacaaaggttggcagcgccgtattttcaccctccagcgcctgctccaccagcgcatcactaatcaccggagatgaggtcagcgccacgcactgttcaatcacgttgaccaactggcgcacattacccggccagctcgcggtcatcaggcgtttcatcgcatcggtagagaacgcgcggacaaacggtttatgtcgctctgccgcctggcgcaacaggtgatttgccagtagcggaatgtcttctgtgcgctccgccagtgccggaattttcaggctgacaacgttgaggcggtaatagagatcttcgcggaattccccgcgcgccatcgcttttggcagatcacggtgagtggcagaaataatccgcacattgatatcaatatcgcggttactgcccagcgggcgcactttacgctcctgcaacacgcgcagcagtttgacctgtaacggcgcaggcatatcgccaatttcatcgagaaatagcgttccgccttccgccgcctggaataaaccttcgcgattgctgacagcgccagtaaacgcgccacgcgcatgaccaaacagctccgactccagcaattgctcgggcaatgcgccacagttaatagcaataaatggtttgctgttgcgcgggctggcgttgtggatagcctgggcgaaaatctctttcccggtgccgctctgaccgttaatcaaaacgctgacgtctgattgcgccaccagccgcgcctgttccagcaaacgcagcatcagcgggctgcgggtgacaattgcctcgcgccagcgttcatcggtggctggcgcggattgctccagcgcatcgtcaattgcctgatatagcgcgtctttgtcgacaggcttggtgaggaaactaaaaacgccctgctgtgttgcagcaacggcatcgggaatagaaccatgcgcggtaagaataattaccggcattcccggctgcactttctggatttcagcaaacagctgcataccgtccatttcatccatccgcaggtcgctgatgactaaatctactttttcgcgattcagtacccgtaatccttcagcgccactttccgccgtgaccacactgtagccttcgctggtcaggcgcaggccaagcagtttcagcaatcccggatcgtcatcgaccaataataaatgcgcaggtttatggctcatcaggagtgacctcatgggtggatggcgcgggcttttcactctcgtgcggcgtatccggcgagaaatttccagccggtttgcgggtcgagagctggcgttcaatatcggtcaggttttccagcttgcgggtggtgagttccagttgctgctgtagaacgtgatgttgctggcgcaatgtatccagctcgctgtcgctggactgctggagtttactgtaacgttggcgctcttccgccagttgcagttgcagcgcctgaccatcgcgccagagttgatacagtgggcgaacctgtgccgggatctcggtacttaacgcttcaatacgcgcgaccagctggcggcgctcatacggcgtaattttggcgtcggcgagcaaaatcccttgtttaaaggtattttgccagctgccgtcgtcatattggcgagcttgctgacgcgactgcgcaggcattaaacgatcagcacaatccatcgcccgcagccagtaaagcggattggtttcggttgatttaccttgcagcgcccagatgtcgctacattcagtagaaagatagtcagccagttgataaaccggaattttttcttctgctggcgtatcaatggctggcttattgtgattctgcacgcaacccagcaatgccagacatggcagccctgccagccacagccgtcggggcaataatcgttgaaaaatgtgtcgcatattcaccagacttaaagcctatcccagtgggcgtaattgttgcagacagtctggacatggacagcgcggagaaaccggagcgtacatatcgtacgtgaagatttcgagcactgcccggggccgaactgacaaataaaatagcctgataggataggctgttagcattatttcgtgtttttcgacgacggtaattcaatgcggaaacaaacgtcttgcccgctctcgtcgaccagatacagttccccttgcatacggcgaatacaatccctggcaatgcttaatcccagaccgctgcccttcaccgccccttttcgctggtggcttccctgaaaaaagggttcgaagatcatggcgcgttcctcttgcggaatgggcgtgcctgtattgatgacatcaatataaacccgcgcaccatgtaaactgctgcgaaggcaaatgttaccggattcagccccgtagtgcaccgcattggagtaaagattatccagtacgctcatcagcagcattggctccgccaggcaagctgttgctttgagatcgacgtcggtatgcatcattttagcccgtgcgggcaggctatgagcagaaaccactgtctccaccagcggtgctaactcaacattctccagttccaccgcactgtccgcctgtttacggttgtaatcaagcagttgttcgatcagtttttgcaaattgcggctgctgctatcaagaatgctcaccacctctttttgctctggcgtaagcggcccgacaacctggtcagccagtaattcagtgccctcgcgcatactcgccagtggcgtttttaattcatgagataaatgtcttaaaaattgatggcgttgggattccagccatgacaggcgctcacttaaccaaagaatacgttgcccaaccgagcgtaactcgctcggtccactgaacgagacgctattgcccagagaacgcccttcccccagacggttgatcatgcgctcgatatttttcaccggcccgataatcatccgcgtgaaaagcagtaccattaccagactcaccagaaatagcaccagcgattgccaaccaaaatattgcccacgttcggcgatttcacgctgaagctgctgcccacgagagaacaccactgtgcgcgtggcctgtaccatttcggtattggcactggcaaaggcttcaagacgtgcggcggcggcagcatcgggaccgctgttgttacactgaagttgagccagattgtgcaaatcctgacgtaatgcctggtagagtttatcgtccggcagcacgcctgcgtgggcatcgagcatttcgctgtaacgcttgcgctggctttgataaaccttcgccagggttgggtcgtccagcacgcaatactgacggtaactacgctccatctccagcgccgcgttggtcatcgcttcactgcgccgggcatcaataagcgtagtgcggttaaccagcgccgcctgatcgctaagcgcattcaggctttgccaggcttgccatgccagcaccaacaggggcagcagaatcagcaaaaatgccagcattaccagttgtcgtaatgagcggggaaaaacgggccagcgtttcaaggtgttactctcgtcagacgcgaatagcctgatgctaaccgaggggaagttcagatacaacaaagccgggaattacccggctttgttatggaataaggcggtgcctaactcgacgtttcgcccgatggttgatatagctacgctgatatcagaagttggacggcaggcaccttgttgtgcgtcattcgtattttatgtagcacgtcccgaaggggctgacataagtcggtgaatgagccactggttactattatgcagtaactgtgccaataaagaaaatagtttggtaacgtactgattatacgttgctttgaggggtttatgtctcctccgctgtttgaatgtaaatcagccactgtgtcgctaaaaagagacaacttaagataaacttattagataatattaaaatcaatgagttaagtgtcgccagaaagcgacacggcaaaccacccattgtcgtgatttacagacacaaaaaagctcccggagttgggagcttatgatagtggttggtgcttaatgccgcatccgggctgcaaaaccaatgggctgacgacttaccccaactgcttacgcgcattgcggaaaatgcgcatccatgggccatcctcgccccagttttccggatgccaggagttgctgacagtacggaaaacacgttccgggtgcggcatcataatggtgactcgaccactttcagtcgtgactgccgtaataccgttcggtgaaccgttcgggttagccgggtaggtttcagtgactttgccgaagttatcgacatagcgcagtgccaccagccctttgctttccagtgccgccagatgcgccgcatcacgcacttccacgcgcccttcaccatgagagacagcaatcggcatttgcgagcccaccatcccctgcaacagcagagacgggctttgggttacttcaaccaggctgaaacgcgcttcaaagcgatcggaggtattgcgcacaaaacgtggccacaactcactacctgggatcagttcacgcagattagacatcatctggcaaccgttacatacccccagcgccagcgtttgcggacggtggaagaaggttgcaaactcatcgcgtacacggtcattgaacaggattgacttcgcccaaccttcaccggcacccagcacatcaccgtaggagaaaccaccgcacgcgaccagggcgtggaaatcttccaggcccgtgcgtccggtcagcaggtcactcatatgcacgtcgatagcatcaaagcctgcacggtggaaagctgccgccatttcaacatgcgagttcacgccctgctcacgcagtacggcaactttcggacgtgcgccagtggcaatatacggtgctgccacatcttcgttgatatcgaacgacagttttacattcaggcccggatcggcgtcgttagatttcgcctgatgctcctgatcggcacactccgggttgtcacgcaggcgctgcatctgccaggtagtttctgcccaccagacacgcaacgtggtgcggctttcgctgaatacagtctgcccgttggcggtaatcacaaaacggtcaccggaaaccgcctgccctacataatggacacaatcagcaagcccatgctgtgccagtacggactcgaccgcttcacggtcagcggcacgaacctgaatcaccgcacccagttcttcgttaaacaacgccgccaggcgatcgtcacccagagtggcgatatccgcgtcaatgccacaatgaccagcaaaggccatttccgccagcgttaccagcaggccgccatcagagcggtcgtgatacgccagcagcttacgctgtgcaaccagcgcctgaatcgcgtcatagaagcctttcagttgcgcgacatcgcgtacatctgccggtttgtcgccaagctgacgataaacctgcgccagcgccgttgcgcccagcgcgttattgcctttgcccaaatcaatcagcagcagtgcgttatcttcggtagaaagctgcggcgtgatggtgtgacgtacatcttccacgcgggcaaatgcagaaatcaccagcgacagcggcgacgtcatttcgcgctcttcgttaccttcctgccagcgggttttcatcgacatggagtctttacccaccgggatcgtcaggcccagcgccggacaaagctcttcgcccacggctttaacggcttcatacaggcccgcatcttcaccagggtggcctgccgccgccatccagttggcggaaagtttgatgcgtttgatatcgccaatttgtgttgcggcgatgttggttaacgcttcaccgaccgccagacgggcagaggcggcgaaatccagcagcgcaaccggcgcacgctcgccaatcgccatcgcttcaccgtagtagctgtcgaggctggcggtagtgaccgcgcagttagcgaccggcacctgccacggccccaccatctgatcgcgcgctaccatgccggttacgctgcggtcgccaatggtcaccaggaaggttttttccgccacagtcggcagatgcagcacacgtttcaccgcgtctgcaatggtgatcccttcacgggccagcgcgtcgcctttcgctttcagcgtttgtacatcgcgggtcatcttcggcgttttaccaagcaggacgtccagcggcagatcgatcggctgattatcaaaatgacgatcgtgcagagaaagatgcagttcttcggtcgcttcaccaatcaccgcgtagggtgcgcgctcacgcttacacagttcgtcaaacagcggtaattgatcggcagcaaccgccagcacgtagcgttcctgggattcgttacaccagatttccagcgggctcatgcccggttcgtcgcttagaatctcgcgcagttcaaatttaccgccgcgcccgccgtcgctcaccagttccggcatggcgttagaaagaccgccagcgccaacgtcgtggataaacaggattgggttggcatcaccaagctgccagcaacggtcgatcacttcctggcagcgacgctccatctccgggttgtcgcgctgtacggaagcaaagtcgaggtcggcatcagactgaccagacgccatagaagacgctgcaccaccgccaagaccgatgttcattgccgggccgccgagaacgaccagcttcgcaccgacgttgatctcgcctttttgtacgtgatcggcgcgaatgttgccgatcccgcccgccagcatgatcggtttgtgataaccgcgcagctcttcgccgttgtggctgttcactttttcttcataagtacggaagtagccgttcagtgccggacgaccaaattcgttgttaaacgccgcgccgcccagcgggccttcggtcatgatgtccagcgcggtgacaatgcgctcaggcttaccgaaatcttcttcccacggctgttcgaagccaggaattcgcaggttggaaacggagaaaccaaccagacccgctttcggctttgcgccgcgcccggtggcaccttcatcgcggatttcaccgccggaaccggtcgccgcgcccggccacggagaaatcgccgtcgggtggttgtgagtttcgactttcatcagaatatgcgccggttcctgatggaaatcgtagcggcccgtttcgtggtcagcaaagtagcggcccacttcagaaccttccattacggcggcgttatctttataagcagagagaacgtgatctggcgtggtttcgaaagtatttttgatcatcttgaacagcgatttcggctgctgttcaccatcgataacccagtcggcgttaaaaattttgtggcggcagtgctcggagttcgcctgggcaaacatatacagttcgatgtcgttcgggttacgaccaagctttgtgaaagcatcctgcagatagtcaatttcatcttccgccagagccaagccaagacgcaggttagcgtcgatcagcgcctgacggccctgccccagcaaatcaacgctggtaaccggagtcggttgatggtgggcaaacaactgctctgcatcatctaaagcaaaaaagaccgtttccatcatgcggtcgtgcagttcagcggtaacctgctgccattgttcattggtcagcgtaccggcttctatatagtaagcaacgccgcgctcaaggcggtttacctgttgtagcccgcagttatgggcaatatcggtcgctttcgaagaccagggagagatggtgccaggacgcggggtcaccagcaggagtttgccttgcggggcgtggctggcgagtgccgggccatatttcagcaggcgttcaagttgtgcgtgctcatcatcgtttaacggcgcattgaggtcagcaaaatggacatactcggcgtaaatattgtgaaccgggagcctggcagcctgaaaacgtgccagcagtttgttgattcggaatgccgacagtgcaggcgaaccacgcagaatttccatcataagtctctcgtcttctaagctttcggtgtacccaagggggggaaacgggcgtcattataaagaatctgatgcgctgacgaaaccgtttgcgtggaaataaaatcaccatcgtgaattagcaacgcgtgccgccaatggctgtaataagttgccatctggcgcaggtttacgcaaaatgccgctcatttatgagtaaacctttcactattattacgttttttcaagctgggacgcgcacgacacagagaattaactaattgaaaaaattaaagattaattatctgttcatcggcattctggcactgctgctcgcggtcgctctctggccatccattccctggtttggtaaagccgacaaccgtatcgccgccattcaagcgcggggagagttgcgtgtgagcaccattcatactcccctgacttataacgaaatcaacgggaaaccttttggcctggattacgaactggcgaaacagtttgccgattacctcggcgtaaaactgaaagtgaccgtgcggcagaatatcagccagctgtttgacgaccttgataatggtaacgccgacctgctggcggcaggacttgtctataacagtgagcgggtaaaaaattatcagcctggccctacctattattccgtgtcacaacaactggtttataaagtgggtcagtatcgcccacgtacgctgggcaacctgacggcggagcaactcaccgttgcaccgggtcatgtggtggttaacgatctccagaccctgaaagaaacaaaattcccggaattaagctggaaggtagacgacaaaaaaggctctgcggaattaatggaagatgtcatcgaaggaaaactcgattacaccattgctgattctgtcgccatcagcctgtttcagcgcgttcacccggagctcgccgtagcgctcgatatcaccgatgaacaaccggtgacttggtttagcccgttagatggcgataataccctttccgccgccctgctcgacttcttcaacgaaatgaatgaagacggtacgctggcacgcattgaagagaaatacctggggcatggcgatgattttgattacgtcgatacgcgcacatttttacgcgccgtcgatgcggtactgccgcagttaaagcccctgtttgagaaatacgccgaagaaattgactggcgtttgctggccgctattgcttatcaggaatcgcactgggatgcacaggccacttcaccgacgggtgtgcgcggcatgatgatgttaaccaaaaataccgcgcaaagcctcggcattacggatcgtaccgatgccgaacagagcatcagcggtggcgtgcgttatttgcaggatatgatgagtaaagtgccggaaagtgtgccggagaacgagcggatctggtttgccctcgctgcgtacaatatgggctatgcgcatatgctggatgcccgcgccctgacggcaaaaaccaaagggaatcctgacagttgggctgacgtaaaacagcgtctgcctttacttagccagaaaccctattacagcaagctgacttacggctacgctcgtggacatgaagcctacgcttatgtcgaaaatattcgtaagtatcagattagcctggtgggttatctgcaagagaaagagaagcaggctacagaagcggcgatgcaactggcgcaggattatccggcggtatcgcctacggagttgggcaaagagaaatttccttttctctcgtttctttcccagtcgtcatcaaactatttgacccattctccctctctgctgttttccaggaaagggagtgaagagaaacaaaattaatccgtcgaggattgcgcttttttctgcgctttaatttcctggcggcgcatgcgaaagaagtcactgagcaacgccgcgcactcatccgccagtattccttccgtaatttccactcggtgattcatacccggatgatgcagcacatccattaaagatcccgcagcgccagttttcgcgtcacgcgcaccaaagaccacgcgaccaatgcgactgtggatcatcgctccggcacacattacacatggttcaagcgtgacatacaacgtggcgtcgatcagacgataattttgcatcaccagaccaccctgccgcagggccatgatttctgcatgtgcggtgggatcatggcgaccaatcgggcggttccagccttcgccgattacccgattgttatgcactaataccgcgccgaccggcacttcccgctcatcccaggcacgtttcgccagcgtcagcgcgtgacgcatccagtattcgtggctaaattcgacttcagacaaaaagaaaactccggttataaaagcgcggcgcattatacacggacgctatgctttactctattccagttgctggagttcaccgcgcggggttactcgccaacgatgctgacagaaataaagcagcggattgtcctgattactgtcgctatagccactgtacagccgcagcggagtgccgattttgcgctccagttgtgcgaccttttcatgtcccagacaacgcatcgtcaatacccaaccaccatagccacgctgaatttggctggcgataagattaacccgcggcagccagggcgtatcgaaataaaccgcttcaaccagcggctgcggagagccggtaatcaaccagatatcagcatcggaacttaacaggtaggtggttaatcgctcctgaaccagcggaaaggcggtaacattgtcgcgaaaccagcgcacgaaatcggcctgcaacgtctgtaaacgtgcttcgctgtgaccaaaagtgcacccccacagaagcagactcatcggccagcgtgccgcacgaccttttatcaataacgcaatggctataatcggtaacaacggcaggacaagtaacgcattcagcggttggcgacgtagtaaatagcgcagaaaactgccgaacatatcctgctgatgcaatgttccatctaagtcaaaaaacaccacacgacgctcgtgagttgccaaaccatactcctctggactgaaacatcctgattaattttcgctactacatagcctaacagatagatcatcacttttccggcaacaatcgaccgcatcatggctaactggaatttttaattcatggcaattagcggcaatggaatataaaattcactcgcgtgtgtctcatattgcctgttgtcgccactatttcatcgcgaggaaagatatgaacggcttacttcgtatccgtcagcgttaccaggggcttgcccagagtgataaaaaactggcggattatctgctgctacaacctgatacggcgcgccatttaagctctcagcaactggccaacgaagccggagtcagtcagtccagcgtcgtgaagttcgcgcaaaaactcggctataaaggttttccggcgcttaagttggcgttgagtgaagcgctggcaagccagccggaatcaccctccgtgcccattcataaccaaatccgcggtgatgatccgttacggctggtcggcgaaaaactgattaaagaaaatactgccgctatgtacgcaacgctaaacgttaatagtgaagagaaactgcatgaatgcgtaacaatgttgcgctctgcgcggcggataattctgaccggtattggcgcttcgggtctggtggcgcaaaactttgcctggaagctgatgaagattggcttcaatgctgccgcagtgcgcgatatgcatgcgctactcgcaacagtacaggcgtcgtcccctgacgatctgttattagccatttcctacaccggtgtacgacgcgagttaaacctggcggcagatgagatgctgcgagtgggcggaaaagtgctggcgattaccggctttactccgaatgccctgcaacagcgtgcttctcattgcctgtataccattgccgaagaacaagcgacaaacagtgcttcaatctctgcttgtcacgctcagggaatgttaacggatttgctgttcattgcgctgattcagcaggatctggaactggcaccagaacgtattcgtcatagtgaagcgctggtgaaaaaactggtctgagtaaagaatgcgcgtataatgcccgcccggtttgtgttgttttgagagtttccttatggcgttgttaatcactaaaaaatgcatcaattgtgatatgtgtgaacccgaatgcccgaatgaggcgatttcaatgggagatcatatctacgagattaacagcgataagtgtaccgaatgcgtagggcactacgagacaccaacctgccagaaggtgtgcccgatccccaatactattgtgaaagatccggcgcatgtcgagacagaagaacagttgtgggataaatttgtgctgatgcaccacgcggataaaatttaatattctactctggaagtagagtattaattatattactgggaagccttaacgccattatatttatttaattgatgacattagcataatcattcactaagttaatttatatagtatctgcccagacacttatttatagttattaaaggtgcgtccgactggttcaccggacgcaccttaagtacgtttccttgtgttataagaacagaaggatcagctgtaaaacagcaatgatgattttgatgacccgtttaatcaggtatcggcaatcagtcattcgtttttccttaaacaaggaatgcagccattcagattagcccttacatctccccaaaactgaacgtgcgagttattgagggtgcatgctgcactccacaccagagctttgacgacaccactcgtttcaatgggggaattctgtggcatggtgtaaagcacagcaaaatcttcaataacgaagccaattttaatgtacttacgaattggcggtcacgttaatctttccatcaatattgctttcttcgtaaaggctcgagtttttatgctaaagattgcaagttgcttgtaaaagataagtacactgatccataatcgctgttgttgagggtgcatgctgcacaaaattaaagttaaaaagtaaaacccccgttccttaccagttcgggggttttactttttaaagagaacggtattatttttaactttcaataattaccgtggcacaagcatagtgccgctcatctgccagcgttacatgcatatttgcaacgcccagcttttccgccagttttaatgcctcgccccatagccgtagccgtggtttgccaagctcatcattgaatacttcaaattgattaaacgccagaccattgcggatcccggtgccaaacgcttttgctgcggcttctttcacagcaaaacgcttcgccagaaaacgcaccggctggtggtgcgttttccagatagcccattcgttatcgcttaatacgcggcgtgccaggcgatcaccggatcgggcgatcaccgcttcgatgcgagcgatctccacaatatccgtgcctaaacctaatattgccattagccacgcgcttccagcatcagacgcttcatttctgccaccgcatctttcagtccggtcatcactgcacgaccaataatggcatgaccgatattcagttcatgcatctcagggatggcggcaatggctttcacgttgtgataggtcagaccgtgtccggcgttaactttcagaccgaggcttgcggcaaaggtcgcggctttggcgatacgcgccagctcttgcgcctgttcggcgtcagttttggcatcagcatagcaaccggtgtggatctcgataaacggtgcgccaacctctgccgcagctttgatctgctcttcatcggcgtcaataaacagagaaacctgaatcccggcatctgccagacgtttgcaggcatcgcgcattttgtcacgctgccctgcgacatccaggccgccttcggttgttacttcctgacgcttttccggtaccaggcagcaaaaatgtggcttcgtctcaacggcgatcgccagcatctcttcggtcaccgccatctccagattcatgcgggtatccagcgtctgacgcaggatgcgcacgtcgcggtcagtaatgtgacggcgatcttcacgtaaatgcacggtaatgccgtccgctcccgcctgctcggcaataaacgcggcctgcaccggatccgggtaagcggtaccgcgcgcgttgcgcagcgtagcgatatggtcaatgttgacgcctaacagtaattcagccatgacaatcctcatcattcataatgtgttttcaccgttcgcttaggcataaactgccggaacagttccctgctctttaaaggtttaccgccaagatacggcttaagcgccatgcgggtaaagcgtttcgcggcgcgcagtgtgtctgcgtcaggaaattcccgtgcgtttaacgcttttaactgccttccggtgaacgttttattgtcgataacgacgcttgcgataaaccctttttcttcgcgataacgatacgtcatggtgtcatctaccggctcgccgctacccgcacaatgggtaaaattgacgccataacccagatgcccgagcagtgccagttcaaagcggcgcagcgcgggttctggcgtaccagtgacccctgcaagagactgaatgcagtgcaagtaatcgaaaaaaagttcagagaagcgcgtctcgtattccagtacgcgggagagaagttcgttgatgtacagaccgctgtaaagcgtgataccgcttaatggcagcgccagcgagacggcttcagcactgcgcagcgttttgacttcgccacgcccgccaaaacgtagcaagagaggggtgaaaggctgtaatgcacctttcagggtagagcgtttagagcgtgcgcctttggcaaccagacgcacgcgccccgattcctccgtgaagacgtccagcatcaggctggtttcgctccacgggcgactatgcaggacaaatgcgcgctgccagccttccatcggagttactcttaaagatcgtcaacgtaaccgagactgcgcagtgcgcgttcgtcgtcggcccaaccggatttcacttttacccacagttcaaggtgaacaggcgcttcgaacatttcctgcatgtctttacgcgcttcaatcccgatggttttgatcttggcccctttgttgccaatgaccatcttcttctgcccttcacgctcaacgagaatcaaaccgttgatgtcataaccaccgcgttcgttagagacgaaacgttcgatctccacggtcacggagtacggcagttcagcgccgaggaaacgcatcagtttttcgcggatgatttcagacgccataaaacgctgtgagcgatcggtgatgtaatcttccgggaagtgatgagtcgcttcaggtagatgcttacgcacgattgccgcaatagtgtcaacattcagcccggtttcggcagagattggcacgatatcgaggaagttcatctggcttgccaggaactgcaggtgcggcagcagatcggctttctcctgcacgttgtccactttgttcaccgcgaggattaccggcgctttgccttcgcgcagtttgttgagcaccatttcgtcgtccggcgtccagcgggtgccttcaacgacaaaaatcaccagctcaacatcgccaatagagctgctcgccgctttgttcatcaggcggttaatggcgcgtttttcttccatatgcaggcccggtgtatcgacgtagatcgcctgatacgcgccttcagtatggatccccacaatgcggtgacgagttgtctgcgccttgcgggaagtgatggagattttctgccccagcagtttgttcaacaatgtggatttgccaacgttcggacgtccgacgatggcaataaatccgcagtaacttttatcgatgctcattccagctccagttttttcaacgcctgttcggcggcagcctgctcagccttacgacggcttgaacctgtgccaaccaccggttcactcaggccgctgacctggcagtggatagtaaattcctgatcgtgcgcttcgccacgtacctggactaccagataagtcggcagcggcagatggcgaccctgcaaatattcttgcaagcgcgttttcggatctttttgtttatcgcctgggctaatttcgtccaaacgagtttgataccagttgaggattaatttctcgacggtttgaatatcactgtcgaggaatacgccaccaattaatgcttcgacggtgtcggcgagaattgactcacgacgaaatccaccgcttttaagttcacctggccctaaacgtaagcactcgcctaactcaaattcgcgcgccagttccgccagcgtattgccacggaccagcgtggcgcgcatccggctcatatcgccttcatccacacgagggaaacggtgataaagcgcattggcgataacgtagctcagaatagagtcgcctaaaaattctaaacgctcgttatgtttactgctggcactacgatgagttaatgcctgctgcaacagttcctgatgattaaaagtgtagcccagcttccgttgaagccgattaattacgatggggttcatgcgataccaataaataaatgcgtcaacaattcagcacacgaaacagacctgatatacatggttctgctaactgcttcgctgcagtttcagtttaccggtatatggggaccaacgctgtttcgtgtgccgtggcaacctggaggtgccaaccttaaacttcgggggaatattctatacacaacgacgggggatgtcgttagccacgggagatttatctcataaataattcacgttgtcgccataacggcgacaacgtgaacgaagatggctattaatggatgccgccaatgcgacttaagcgcagaccagtcggccattcgccttcttgcttatcgaagctcatccagatagccgttgcccgaccgaccagattcgcttccggcacaaagccccagtaacggctgtccgcgctgttgtcgcggttgtcgcccatcatgaagtattgtcccggaggaacaatccaggttgccagttgttgccctggctgctggtaatacatccccacctgatcctgcgcaatcggcactgtcagaatgcggtgcgtcacatcacccagtgtctctttacgctcggaaagacgaattccattttctttggtttcgtttttcggcacttcaaagaatccgctggtcgcttccccaccattacggcgtgagaaggtctgaacgaaatcgctcggttccacgtttgagtaggtgaccggcagcgcgttttcacacgcctggccggaactgcatcccggttgaatcgtcagctcttttgagaccggatcgtaagtgactttatcgcccggtaaacccaccgcgcgcttgatgtaatcaagctttggatcttccggatatttaaagaccacgatatcgccgcgtttcggatgaccggtttcgatcagcgttttctggtagataggatctttaatgccataagcaaacttctctaccagaataaaatcaccaattaacagagtcggcatcatcgaacctgacgggatctggaacggttcataaataaacgaacgcacaatcaatacgatagccagtaccggaaaaacagaagcaccggtttccagccagccaggcttcggcgcaacctttttcaacgttgctttatccagtgagtccccggcagccgcctgcgccgctgcctgacgttcccgccgtttaggtgcgaaaaagaatttatccacgcaccataaaatgcccgtcaccagtgtggcaatcaccagaatcagggcaaacatattcgccatgccaactcctaagggttatttgttgtctttgccgacgtgcagaatggcgaggaacgcttcctgcggcagctcgacgttaccgatctgcttcatgcgtttcttaccttctttctgcttctgcagcagctttttcttacggctgatatcgccgccataacatttagccagtacgtttttacgcagctgtttcacggtggatcgcgcaatgatgtgcgtaccaatcgctgcctgaatggcgatatcaaactgctggcgtgggatcagatctttcatcttctccaccaactcgcgaccgcggttttgcgaattatcacggtgggtgatcaacgccagcgcatcaacacgttcaccgttgattaatacgtctacacgtaccatgtcggacgcctggaagcgcttgaagttgtaatccagagacgcataaccacgcgaggtagatttcaggcgatcgaagaagtcgagcaccacttccgccatcgggatctcgtacgtcagcgccacctgattaccgtggtaaaccatattggtctgcacgccgcgtttttctacgcacaacgtaataacgttgccgagatatgcctgcggcagcagcatgtgacactctgcaatcggctcgcgcagttcgtagatgttatttaccgcaggcagcttggatgggctgtcgacgtagataacttctcttgacgtggtttcaacttcatacactacggtcggcgcagtggtgatcagatccagatcgtattcacgttccagacgttcctggatgatctccatgtgcagcaggccgaggaagccgcagcggaaaccaaagcccagcgcgctggagctttccggctcatagaacagtgaggcatcgttcaggctgagtttacccagcgcgtcacggaaggcttcatagtcgtcggaacttaccgggaacagaccggcgtatacctgcggtttgactttcttaaagccaggcagcgccttttctgccggattacgcgccagcgttaaggtatcgccgactggagcgccgtggatatctttaatcgcacatacgagccagcctacttcgccacatttcagttcagtgcggtcaacctgtttcggcgtgaagatgcccagacggtcggcgttataggtctgcccggtactcatgactttcactttgtcgcccttacgcagggtgccgtttttaatacggataagtgaaacaacgcccaggtagttgtcgaaccatgagtcgataattagtgcctgcaacgggccttccggatcgccttccggcggcggaatgtcgcgcaccagacgttcgagaacgtcctgcacaccaacgccggttttcgctgaacagcgcaccgcgtcggtggcgtcgatgccgacgatatcttcaatttcttccgccacgcgttcaggatcggctgccggcaggtcaatcttgttcagtaccggcacaacttcgagatccatttccatggcggtgtagcagtttgccagggtttgcgcttctacgccctgcccggcgtcgaccaccagcaatgcaccttcacaggcagccagcgaacgggaaacttcataggagaagtctacgtggcccggggtgtcgataaagttaagctgataggtttcgccgtcagacgctttgtagtccagcgtcacgctttgcgctttgatggtaatgccacgctcacgctcaagatccatggaatcgagaacctgcgcctccatttcacggtcagacaggccaccgcagatctggataatacggtcagacagcgtcgatttaccgtggtcaatgtgagctatgatcgaaaagttacgtatattcttcataaagtatgattattgtgccttaatgcccggttaaccaggcttttagaagtcgctgttctgagcttaacgtctgtattaatagaaacgccgcattctacactacaacattgaggcgaggaaatgttcataccgtatggattgtggtatctggaaacgtcctcgcatttgttatgcaaaatgcaacaaagccagtgaaatcactggctcgcgtcttccgaagatgtttcaaatcgcacaaggccaggcggcaatgccacgcttaagatgatcggttgccattctgcccgggcagcaaacttacgcgagtagccgcgcgcaatcaggaacccgccaataccaccgaggatcgcaccacataatgctgcgacgtcagaagcaaagagtagctgaaatagcgaagcgataaggaataatcccaccagcggcgacatataaaccagtaatgcggagctaagcaggctgccttcggcgatccccaattccactttttgccccggcactaacggctcatcacagggtacgacaatggtatgcgtggtttgcgggccaagtttatttaacacgcggctaccgcaaccggcgcgtgaagcgcagctgctgcatgaagctttaacatcacaactgaccagcgcctgcccgttttgccaggagacgacggtagcccactctttgatcattgcgctgccccgaacttaatattctcggcaatgcgtttcgccgtttgcggcggcagttcaccgacaatggtgatttcggcgttatcacgtacgcttgtactgacggttctgcgtccggtgcgcaacatctgatcggtgctcgatggcgtagcgcggttaacgtttaccgagaagctgaataatccgtcggaatagagacgtgattcgataggcatgttgtccatcgtcggtagcggacgtcgactactggaaacttcgctaaaaccctgtggcaaccaggttggcgtccagctgaatttagctttttcacctacaggaacagaaagcaacggcggcaaatttgccttcgccagcgtctgcatactgctgctgatatcctgattgacgttaaaagcaatcacgcgaaattgttccagcgtttcaccatcgcgatcaaggagatcaacccgcatcggtaatttcgattcggtgtccatccacacgatgtagctgtagcgtgtaccatctcgggcaaccacgcgaatgacttcgcaaagacgatcagcaatacgcgtgcgcccgacggagataaagtcgtagtaaggagaaaggcgtttgaaatcggtatagataagcgatggcagagaatcaacaatgtaatcgccattaagcgtgaacggttcaagtcccggttcaaaatagctgatttcattgccgcgctgtaccacttcccggcgcgggccatccatttgcaacaattgtgcaagaggacggttatcgaggcgtgcatgtcgataacgcagagactcaacaccctgtttattgatgctgatgaatgacagctcgtaattcagtgactgactggccaggttcatctgctgtaataacgccccggacgcgggagtggccgaggcgttagcagagaataacaggctacctgtcactaatgacatggcaaaccaaagttgcttcattactgcgattgcgttcctaaagtttgaattcctggcacctgtacagcggcttgctgggtttgcgcctgctcaaactgaagctgttcagagtggagtcggcgttgcagttcgtaatcctgcaacattgcattaatgcgacgacgctgctcctgtacctgctgctgttgaccattgtttgcggtcgcttcagaaggtactcccaggcttaccgggctggctttacccatcatcggcagtgtattaaataccggcgtttcgggctgctgggacgtttcagattgtccattatagtgctggacgccaacgataactgcaagcgatacgcatgcggctacgcccatttgggtaagctgtgccgcccacggacgtactttctgccagaatggcattttctgccattgatgcggcgcaggctgggcttccgggatcaatgtcgccggttgacgtactggctcttcttcaatggcggccatcacgcgtgaagagatatcgaaatggagcacctcgggagtatcaccccgcattgagtcacggattaagtgatagctttcccaggttttctgcatttctgggttatgagccagttcgttaagcagctcactatccagcgtttcgccatccattaaagcggaaagttgttctttctgcatgcctaatacccttatccagtatcccgctatcgtcaacgcctgataagcggttgaactttgttatcaatagcttccctcgctcggaagatacgtgaacgcaccgtacctaccggacaatccatgatagcggctatctcttcatagctcaggccatccagctcccgcaaggttattgccatgcgtaaatcttccgggagggactcaatagttcggaaaactatctgtctcagttcttctgacaacattaagttctcagggttcgaaatttctttcaacgcgccgccactttcgaagttttcagcttcaatggcatccacatcactggaaggtggacgacgcccctgagcaaccaggtaatttttcgctgtatttacagcaatccgatacagccatgtataaaaagcgctatctccccggaacgaatccagcgcacgataggctttaataaaagcttcttgtaccacatcgggaacatcacccgacggcacatagcgggaaaccagactcgccactttatgctgatagcgcactaccagtaagttaaaggctttctgatctcccttctggacccgttcaaccaggacctggtccgttaactgctcgctcatccgaggtaaagtctccccaaaccaaatttccacgcgctatcgaaacgccactccattagctgcaatttgagcaagcaaagggttagagtgtctcgtttttgtaaagttccgtaacgcatctgtttttgtttgtcatgctgtagacggatcattatctatcattataagtctacagaatctgaacatcgcattatctgtgtagaaatgcccatttaactgcctgaagagtaacccaacggcctttttatttcaccacctaatcctccaccagccagtaacttctctttttctcgccgccctgcgtcagcgtgtttagcaactgtaacaaatattaaaatagcaggtgtttatccgcacaacatgatgctatgctgaccaaaccatgtttagtaaattaaacaaagaaaatgaatactctccctgaacattcatgtgacgtgttgattatcggtagcggcgcagccggactttcactggcgctacgcctggctgaccagcatcaggtcatcgttctaagtaaaggcccggtaacggaaggttcaacattttatgcccagggcggtattgccgccgtgtttgatgaaactgacagcattgactcgcatgtggaagacacattgattgccggggctggtatttgcgatcgccatgcagttgaatttgtcgccagcaatgcacgatcctgtgtgcaatggctaatcgaccagggggtgttgtttgatacccacattcaaccgaatggcgaagaaagttaccatctgacccgtgaaggtggacatagtcaccgtcgtattcttcatgccgccgacgccaccggtagagaagtagaaaccacgctggtgagcaaggcgctgaaccatccgaatattcgcgtgctggagcgcagcaacgcggttgatctgattgtttctgacaaaattggcctgccgggcacgcgacgggttgttggcgcgtgggtatggaaccgtaataaagaaacggtggaaacctgccacgcaaaagcggtggtgctggcaaccggcggtgcgtcgaaggtttatcagtacaccaccaatccggatatttcttctggcgatggcattgctatggcgtggcgcgcaggctgccgggttgccaatctcgaatttaatcagttccaccctaccgcgctatatcacccacaggcacgcaatttcctgttaacagaagcactgcgcggcgaaggcgcttatctcaagcgcccggatggtacgcgttttatgcccgattttgatgagcgcggcgaactggccccgcgcgatattgtcgcccgcgccattgaccatgaaatgaaacgcctcggcgcagattgtatgttccttgatatcagccataagcccgccgattttattcgccagcatttcccgatgatttatgaaaagctgctcgggctggggattgatctcacacaagaaccggtaccgattgtgcctgctgcacattatacctgcggtggtgtaatggttgatgatcatgggcgtacggacgtcgagggcttgtatgccattggcgaggtgagttataccggcttacacggcgctaaccgcatggcctcgaattcattgctggagtgtctggtctatggctggtcggcggcggaagatatcaccagacgtatgccttatgcccacgacatcagtacgttaccgccgtgggatgaaagccgcgttgagaaccctgacgaacgggtagtaattcagcataactggcacgagctacgtctgtttatgtgggattacgttggcattgtgcgcacaacgaagcgcctggaacgcgccctgcggcggataaccatgctccaacaagaaatagacgaatattacgcccatttccgcgtctcaaataatttgctggagctgcgtaatctggtacaggttgccgagttgattgttcgctgtgcaatgatgcgtaaagagagtcgggggttgcatttcacgctggattatccggaactgctcacccattccggtccgtcgatcctttcccccggcaatcattacataaacagataaaaagcctgggtcagcgccgtatacgcttcggaatagttctggtctggcccacgaatgactaagcgatcgctaaagcattctcccgcctgcggggagaatgccagcagcacccgatgcggcagtcgcgcttcgttttccgccacatccgtccgcaaacgtaaatgccagcccatgcttaatgccagctccgtaaaaccattaccaatctgctctggcagcactacgcagaaaaatccctcttcggtaatgcactccgccgcacaggtcagcaacgatgggtgatcaagcgtagtggtatagcgagcctgttcccgttgaggtgtcgagcactctactccctgctgatagtaaggtgggttactgatgattaaatcgaagcgtactgtctgctgtgtgatccactgctgaatatccgccgtatggacgttaatccgctctgcccacggggactggttgatattttcctgcgcctgcgcggcagcttcactttccagttcaactgcatcaatcatcacgctgtcatcggttcgctgcgccagcattaatgccagcaacccgctacccgcgccgatatcaaggcaacgttttaccccagccaccggtgcccatgcgcccaataaaataccatccgttcccactttcatcgcacagcgatcgtgagcaacaaaaaactgtttaaaagtaaatccattacgacgaagcacggatgtagactgtgacatgaaaataaaaccttgcaggaaaaacggcgatagcaccgggtgagaacaatacccgagaagcgatatccatacaaacagatgaagattgcagccgtaacgtctataatcagcgccccacacagaggtagaacatgactgtaacgactttttccgaacttgaactcgacgaaagcctgctggaagccctccaggataaaggtttcactcgcccgaccgccattcaggctgccgccattccgcctgcgctcgatggccgtgatgtactcggttctgcgccgacaggcaccggtaaaacggcggcgtatctgctgccagcgttgcagcacctgctcgatttcccgcgtaagaaatccggtccgccgcgtattttgatcctcaccccaactcgcgagctggcgatgcaggtgtccgatcatgcccgcgaactggcgaaacatacgcatctggatatcgccaccatcaccggcggcgtagcctatatgaaccacgcggaagtgttcagcgaaaatcaggacatcgtggtcgccacgaccggacgtctgctgcaatacataaaagaagagaacttcgattgccgcgcggttgaaacgctgatcctcgacgaagcagaccgtatgctggatatgggcttcgctcaggatatcgaacatattgctggcgaaacgcgctggcgtaaacagaccctgctcttttcggcaacgctggaaggcgatgcgattcaggactttgccgagcgtctgctggaagatccggtggaagtttctgccaatccctccacccgtgagcgcaaaaaaattcatcagtggtattaccgcgccgatgatcttgagcataaaaccgcgttgctggtgcatctgttaaaacagccggaagcgacccgctcaattgtgtttgtgcgtaagcgtgagcgtgtgcatgagctggcaaactggctgcgcgaagcgggcatcaacaactgctatctcgaaggtgagatggtacagggcaagcgtaacgaagcgatcaagcgtttgaccgaaggtcgcgtaaacgtactggtcgcaaccgatgttgccgcgcgcggtatcgacattcctgacgtcagccacgtctttaacttcgatatgccgcgcagtggcgatacttatttgcaccgtatcggacgtaccgcgcgcgccggtcgtaaaggcaccgcaatttcgctggtggaagcccatgaccatctgctgctgggtaaagtaggccgctatattgaagagccaattaaagctcgcgttattgatgagttacgcccgaaaacgcgtgcgccaagcgaaaagcagaccggcaagccatcgaagaaagtactggctaaacgtgctgagaagaaaaaagctaaagagaaagagaagccgcgggtgaaaaaacgccatcgcgacaccaaaaatattggtaagcgccgtaaaccaagcggaacgggcgtgccaccgcaaacgacagaagagtaatctcaatgccaggtttaagcctggtattaaaagtgctggcaaacgcaaaactgcctgatgcgctacgcttatcaggcctacgtggctcatgcaatatattgaatttgcacgatcttgtaggccggataaggcgttcacgccgcatccggcatgaataaagcgcactttgtcgacaagttaaatgccgggtttaatcccgacattatttttatccagccacaaaactctcttcaacacactgaataaaagtgtgcatcgccgggctaaccgcttttccagcatgatgtgcgcacatggccgtaatggtctgcgactgttcgccaaaaggcaattcaattaattctccgcactccaactcttttgccaccgcaaagcgcggtaggtagctgaccccgatattcgccgcgacacaacgcttgatgctttcgatacttataagctcaatggtgttttccaccgtgatccgccgctgacgcagcgtgctctcaaatatctgccggaagacacattgcggttcgttgataataaagctacaggcgttatgtcttcccggctcagtaaaatcgacatctgcaatttgcggtgaagccaccagcaccagtgattgttcacccaactctcgtcgattcagagcatcatcattccctacacgataaaagacgccaacatcggcctcatcattcagtagcgcatcacggatcacgtaacagttcagcgactgcaacgataaacgcacttttggggcgcgttgccgaaaacgctgcaacacctgcggcattcggtaagagagcaacgtttcgcccgaaacaacgcgtagttccccgtccggatctgactcctttttggcagcctcacgaagcgtatccatcactcgggtaagttcataaatgtgcggcagcaacttttttccttcgcgggtaaggcacatccgtcggccaattttctcaaataactggactgaaaactcctgctcaagctgctgaatatgaaaagtcaccgtcgattgtgtacagcacaatttttgcgaagctcgcaaaaaggaaccctcttccaccacggttttaagcgtaataaaacggcgcagatccataaccccaaacctatcgaaaatatcgaatctagaatataaaaacattcatttttttaaatgttccgtgtcgggtactgtctaccaaaacagaggagataacaagtgacaccgacccttttaagtgctttttggacttacaccctgattaccgctatgacgccaggaccgaacaatattctcgcccttagctctgctacgtcgcatggatttcgtcaaagtacccgcgtgctggcagggatgagtctgggatttttgattgtgatgttactgtgtgcgggcatttcattttcactggcagtgattgacccggcagcggtacaccttttgagttgggcgggggcggcatatattgtctggctggcgtggaaaatcgccaccagcccaacaaaggaagacggacttcaggcaaaaccaatcagcttttgggccagctttgctttgcagtttgtgaacgtcaaaatcattttgtacggtgttacggcactgtcgacgtttgttctgccgcaaacacaggcgttaagctgggtagttggcgtcagcgttttgctggcgatgattgggacgtttggcaatgtgtgctgggcgctggcggggcatctgtttcagcgattgtttcgccagtatggtcgccagttaaatatcgtgcttgccctgttgctggtctattgcgcggtacgcattttctattaacgaaaaaaagcggaagaggtcgccctcttccgcttagtaacttgctacttaagccttacaggctttcagtaaaggtacgagcgataacgtcgcgctgctgttccggagtcagagagttaaagcgaactgcataaccggatacacggatggtcagctgcggatatttttccggatgcttaactgcatcttccagagtttcgcgacgcagaacgttaacgttcaggtgttgaccaccttcaacgcgaacttctggtttcacttctactggaacttcacggtattcaatgtcacccagtttgcttactgcaaccacttcatcttctgcataacctgcttttgcaacgatgcaacgcgcttcgcctttttcgctgtccagcagccagaaagagttcagcagatcgtcgttagcggctttagtaatctggatacctgtaatcatgtgatgcctccccggcaaaattatttgatttgttcagcctgtcgcggccaattggtaaaaccattgttgcttgagtgtatatatactcctcaaacacccttgaatctttgatttaaatcaataaaaaccacacatcaagtatggtcgcaaatggattttattgttttacatcaacttatgcgggtgtgaaattttaccaatttacatttttttgcactcgtttaagtctaaaaaatgagcatgattttgttctgtagaaagaagcagttaagctaggcggattgaagattcgcaggagagcgagatggctaacgaattaacctggcatgacgtgctggctgaagagaagcagcaaccctattttcttaatacccttcagaccgtcgccagcgagcggcagtccggcgtcactatctacccaccacaaaaagatgtctttaacgcgttccgctttacagagttgggtgacgttaaagtggtgattctcggccaggatccttatcacggaccgggacaggcgcatggtctggcattttccgttcgtcccggcattgccattcctccgtcattattgaatatgtataaagagctggaaaatactattccgggcttcacccgccctaatcatggttatcttgaaagctgggcgcgtcagggcgttctgctactcaatactgtgttgacggtacgcgcaggtcaggcgcattcccacgccagcctcggctgggaaaccttcaccgataaagtgatcagcctgattaaccagcatcgcgaaggcgtggtgtttttgttgtggggatcgcatgcgcaaaagaaaggggcgattatagataagcaacgccatcatgtactgaaagcaccgcatccgtcgccgctttcggcgcatcgtggattctttggctgcaaccattttgtgctggcaaatcagtggctggaacaacgtggcgagacgccgattgactggatgccagtattaccggcagagagtgagtaaatttgcggggaaatgccggatggcagagttgccacccggctgatttatcaggctttattctgacgccaccattcaccaagcaaaacgccggttgcgacagagatattcagcccggcaacgttgcccgtaccgtcaatcttcacgcgcagatcgttcggatcgcgtgcggcatccggtaacccttcatattcctgacccagcaccagtaccattttcgctggcagactagttttgaacagcggtttaccctgctcgctggaagtggtcactacggtgtaacctgcctgacggaaatcatccagcacgttaacaatgttgtcgccagtaatcggctgaacgtgctctgcgccgccttctgcggtacggatagccgcccccgactccagcagtgccgcatcctgcaccacgacacctttcacgccgaagtgcgcgcagctgcgcatcatgccacccaggttatgcgggttagattcgttttccagtgccagaacgcaatcctgcgcgcctgcctggcttacccactgctgcacggttgtaccgttacgctttttgatcaagaagcaaacgccgccgtgatgttccgtgcctgacgcttttgtcaattccgcttcatccaccacatggtacgctttgcggtttgctgccatccagcgcaaagcttctttaaaacgcggcgttacactctggataaaccaggcgcgaacaatcgcttccggacggctctggaaaagtgcctgacatgcattttcgccgtagacgcgggtttcttccgcacgctgacgacgcaacacttccggatcaataaaacttttaccactgatgccaccgtgatcggccttttccggcgtctcatcacccggcgcgcgggaaaccgtgcgccacggcgaatcttcccacttgcggtcacggggctgactctgtttgtcatcgcgggcggggcgacggccaccgtcagcacgagattttcctggacgcccgccccctttcccggtacgcgggttgtgggtacgtttatcagaatcatcatcactgcggacatacatcactttgaccttgccgcttttacctttcatttcatcgttcatgcttttctccaccagcgctgcgcgaagcgcgcagattacccgaagtccgcgcggttcgccatgatttcgtaccaaagcctgcgactatcatacctattgaataaaacagattgttgtctggaacaatgtccccgataatatgtaacatattagaaacataccggcgtcgttgccgataagtctccttactcatcccgaggttagttatgaataccgtttgtacccattgtcaggccatcaatcgcattcccgacgatcggatcgaagatgcggcaaaatgcggacgctgcggtcacgacttgtttgacggagaggtgattaatgcgaccggtgaaacactcgacaaattgctgaaggatgatctacctgtggtgatcgacttctgggcaccgtggtgcggcccctgccgtaatttcgcaccaatttttgaagatgtcgcgcaagagcgtagcggtaaagtgcgctttgtgaaagtgaataccgaagctgaacgtgaattgagcagtcgctttggaattcgtagtataccgacgatcatgattttcaaaaacggtcaggttgtcgacatgcttaatggcgcagtaccgaaagcgccgttcgatagctggctgaacgaatctctttaatcttaccggggcgcatcttgtgccccgttttctcctctgcgacaatggcgttttttcgacgctctcttatgaccgaaaacgctgttctccagttacgcgccgagcgtattgcgcgcgcaacacgtccttttcttgcccgcggtaatcgcgttcgtcgctgccaacgctgtcttttgccagagaaattatgtctctgttcgacaattaccccagcacaagcaaaaagtcgcttctgtttgctgatgttcgacaccgagccaatgaagcccagtaataccgggcgtctcattgctgatattttgcctgataccgttgcgtttcaatggtcgcgtaccgaaccctcgcaggatttgctggagttggtgcaaaacccggactatcagccaatggtggtctttcccgcttcgtatgctgatgagcaacgggaagtgatcttcacaccacctgccggtaagccaccgctgtttatcatgctcgatggtacctggccggaagctcgcaagatgtttcgtaaaagtccgtatctggataatcttcccgtcatttccgtcgatctttcccggctttctgcctatcgcctgcgtgaagcccaggctgaaggccaatattgtactgccgaggtagccatcgcactgttagatatggccggcgataccggggcggcggcagggttaggcgagcattttacccgctttaaaacacgctatctggcaggaaaaacgcaacatctgggtagcatcacagcagaacagttagaaagcgtttaaaatcattcggtcacttctgcgggagaccggtatgagtcagcgaggactggaagcactactgcgaccaaaatcgatagcggtaattggcgcgtcgatgaaacccaatcgcgcaggttacctgatgatgcgtaacctgctggcgggaggctttaacggaccggtactcccggtgacgccagcctggaaagcggtgttgggtgtgttggcctggccggatattgccagcttgccctttacacccgaccttgcggttttatgtaccaatgccagccgtaatcttgctcttctggaagagctcggcgagaaaggctgtaaaacctgcattattctttccgccccggcatcgcaacacgaagatctccgcgcctgcgccctgcgccataacatgcgcctgcttggaccaaacagtctgggtttactggctccctggcaaggtctgaatgccagcttttcgcctgtgccgattaaacgcggcaagctggcgtttatttcgcaatcggctgccgtctccaacaccatcctcgactgggcgcaacagcgtaagatgggcttttcctactttattgcgctcggcgacagcctggatatcgacgttgatgaattgcttgactatctggcacgcgacagtaaaaccagcgccatcctgctctatctcgaacagttaagcgacgcgcgacgctttgtttcggcggcccgtagtgcctcgcgtaataaaccgattctggtgattaaaagcggacgtagcccggcggcacagcgactgctcaacacgacggcaggaatggacccggcatgggatgcggctattcagcgtgccggtttgttgcgggtacaggacacccacgagctgttttcggcggtggaaacccttagccatatgcgcccgctacgtggcgaccggctgatgattatcagcaacggtgctgcgcctgccgcgctggcgctggatgccttatggtcacgcaatggcaagctggcaacgctaagcgaagaaacctgccagaaactgcgcgatgcactgccagaacatgtggcaatatctaacccgctcgatctacgcgatgacgccagcagtgagcactatattaaaacgctggatattctgctccacagccaggattttgacgcgctgatggttattcattcgcccagcgccgctgctcccgcaacagaaagcgcgcaagtattaattgaagcggtaaagcatcatccccgcagcaaatatgtctctttgctgacgaactggtgcggcgagcactcctcgcaagaggcacgacgtttattcagcgaagccgggctgccgacctaccgtaccccggaaggaaccatcactgcttttatgcatatggtggagtaccggcgtaatcagaagcaactacgcgaaacgccggcgttgcccagcaatctgacttccaataccgcagaagcgcatcttctgttgcaacaggcgattgccgaaggggctacgtcgctcgatacccatgaagttcagcccatcctgcaagcgtatggcatgaacacgctccctacctggattgccagcgatagcaccgaagcggtgcatattgccgaacagattggttatccggtggcgctgaaattgcgttcgccggatattccacataaatcggaagttcagggcgtcatgctttacctgcgtacagccaatgaagtccagcaagcggcgaacgctattttcgatcgcgtaaaaatggcctggccacaggcgcgggtccacggcctgttggtgcaaagtatggctaaccgtgctggcgctcaggagttgcgggttgtggttgagcacgatccggttttcgggccgttgatcatgctgggtgaaggcggtgtggagtggcgtcctgaagatcaagccgtcgtcgcactgccgccgctgaacatgaacctggcccgctatctggttattcaggggatcaaaagtaaaaagattcgtgcgcgcagtgcgctacgcccattggatgttgcaggcttgagccagcttctggtgcaggtttccaacttgattgtcgattgcccggaaattcagcgtctggatattcatcctttgctggcttctggcagtgaatttaccgcgctggatgtcacgctggatatctcgccgtttgaaggcgataacgagagtcggctggcagtgcgcccttatccgcatcagctggaagaatgggtagaattgaaaaacggtgaacgctgcttgttccgcccgattttgccagaagatgagccacaacttcagcaattcatttcgcgagtcaccaaagaagatctttattaccgctactttagcgagatcaacgaatttacccatgaagatttagccaacatgacacagatcgactacgatcgggaaatggcgtttgtagcggtacgacgtattgatcaaacggaagagatcctcggcgtcacgcgtgcgatttccgatcctgataacatcgatgccgaatttgctgtactggttcgctcggatctcaaagggttaggcttaggtcgacgcttaatggaaaagttgattacctatacgcgagatcacggactacaacgtctgaatggtattacgatgccaaacaatcgtggcatggtggcgctagcccgcaagctcgggtttaacgttgatatccagctcgaagaggggatcgttgggcttacgctaaatcttgcccagcgcgaggaatcatgagtaaggtactggaaatgttgaccacttaatcgggactggtgttattattgcccgcttatgtcgtctgcattgcacagaggacccttcaatgaacagagaagaaatgcactgtgatgttgtcaaaatttaagcgtaataaacatcaacaacaccttgcccaactacccaagatttctcaatcagttgatgatgtcgatttcttttacgctcccgccgacttccgggagacgctgctggaaaaaatagccagcgcgaagcagcgcatttgcattgtcgccctgtatctcgaacaggatgacggtggcaaaggcattctgaacgcgttgtatgaggctaaaaggcagcgtccggaactggatgtgcgggtgctggtcgactggcatcgtgcacaacgtggacgcattggcgctgcggcatctaacactaacgctgactggtactgccgcatggcgcaggaaaatccgggcgtagatgttccggtttatggcgttccaatcaatactcgtgaagcccttggtgttctgcactttaaaggctttatcatcgacgatagcgtactttatagcggtgccagcctgaacgatgtttacctgcatcagcacgataaatatcgctacgaccgttatcatctgatccgtaaccgtaagatgtcagacattatgtttgaatgggttacacagaatattatgaatggccgcggcgttaatcgtctggatgatgttaatcggccaaaaagcccggaaatcaagaacgatattcgtctgttccgccaggagctgcgtgatgccgcttatcatttccagggcgatgccgacaacgatcagctttctgtaacgccgctagtggggctggggaaatcgagtctgttgaacaagaccattttccatcttatgccttgtgccgagcagaaactaaccatctgtacgccatacttcaacctgccagcaatccttgtgcgcaatattatccagttgctgcgcgaagggaaaaaggtcgaaattattgttggtgataaaaccgcgaatgacttctacattccggaagatgaacctttcaagataattggcgcattgccttatctctatgagatcaatctgcgtcgtttcctgagccgtttgcagtattacgtcaatactgaccagctagtggttcggttatggaaagatgacgacaacacctatcacctgaaagggatgtgggttgatgataagtggatgttgatcaccggtaataacctgaacccgcgcgcctggcgtctggatctggaaaacgccattttgatccacgatccgcaacttgagctggcgccacagcgagagaaagaactggagctgatccgcgagcataccaccatcgttaagcactatcgcgatctgcaaagtattgccgattatccggtgaaggttcgtaaactcatccgccgtttgcgccgtatccgcatcgaccgattaattagccgcatcctgtaatcacaaccccgtcctgtacggggtttgttttttggaggccacgttttgcgtattctttttgtctgttcgctattgttactttctggatgcagccatatggctaacgatagctggagcgggcaggataaagctcaacactttatcgcctcggcgatgctttccgccgccggaaatgaatattcacagcatcaggggatgagccgggatcgcagtgccatgtttggattgatgttctctgtcagtttgggggcgtcaaaagagctttgggatagccgccccgaagggagcggctggagctggaaggatttggcctgggatgtcgccggtgcaagcaccggctataccgtctggcaactgacccgtcactaaagacgcatccccttccctttgcgatgtagcatcaaagaaaccagaaacgccaccacggccatcaaggtcacataccagaagaaggctgtttccattcctattgatttcagcgacaacgctacgtactccgccgaaccaccaaatatagcattagcgaccgcatatgacagaccaacgcctaatgcgcgaacctgtgccgggaacatctcagccttcagtattccactgattgatgtataaaaactcactatcagcagggcacacatcaccagaccaaaagcggcataaggcgaggaaacgttttgcaatgctgagagaataggaacggtaaaaatggctgccagcgaaccgaaacataacattgaggtacggcgaccaatcttatccgacagcgcgccaatgagtggttgaataagcatgaatacaaacaatgcggcagtcataatgccactcgccacgttggcatgcattcccgcagtatttaccagatacttctgcatataagtagtgaaggtatagaaacaaagggagcccgcagcggtaaaaccgagaaccatgatgaatgcacggcgattgcgccataatcctttcagagatccagcttcttttaaagcgcgcgtttcttgttgcgaagtttcatctaactgacgacgtaaccacaacgccacaacagctaacacagctcctaacgcgaaaggaatacgccatccccactctctgagtgcagcgtcttccatggtgtgttgtaaaaccacgacaaccagtagggctagcagttgtccgccgatcaacgtcacatactgaaatgatgcgtaaaaacctttgcgcccttcaacggcaacttcactcatataggtggcgctggtgccatattctccgccaacagataatccctgaaataaacgagcgagaagcaataatgccggagcccacgtacctatagtttcataacctgggaggcaggcgataaccagcgatccgaaacacatcatacacaccgataacagcatcgattttttgcgaccatgtttatcggctatgcggccaaatagccaaccgcctattgggcgcatcaggaatcccgcagcaaaaacacctgctgtttgtagtagttgagtcgtcgtgttcccggaagggaagaagatgtgggcaaagtagagtgaacagaacgagtagacatagaaatcgaaccactcgaccagattacctgaagaggcccccacaatcgcccaaatgcggcgacgagtatcactacttgtcagtttgctgtctgccgttacagtactttcagccatgccattatgtctcctgccgtaatccgatgcttttgtcggtcgcttttgtttattttttttgtaaaggaaatattatacatttgttgcatatcattatgcaaccttaaccatgaatttagttagcaggaaaatggttattgaggagcttaaggataaatttctggtaaggaggacacgtatggaagtgggcaagttggggaagccgtatccgttgctgaatctggcatatgtgggagtataagacgcgcagcgtcgcatcaggcatttttttctgcgccaatgcaaaaaggccatccgtcaggatggcctttcgcataatttgatgcctggcagttccctactctcgcatggggagaccccacactaccatcggcgctacggcgtttcacttctgagttcggcatggggtcaggtgggaccaccgcgctacggccgccaggcaaattctgttttatcagaccgcttctgcgttctgatttaatctgtatcaggctgaaaatcttctctcatccgccaaaacagcttcggcgttgtaaggttaagcctcacggttcattagtaccggttagctcaacgcatcgctgcgcttacacacccggcctatcaacgtcgtcgtcttcaacgttccttcaggacccttaaagggtcagggagaactcatctcggggcaagtttcgtgcttagatgctttcagcacttatctcttccgcatttagctaccgggcagtgccattggcatgacaacccgaacaccagtgatgcgtccactccggtcctctcgtactaggagcagcccccctcagttctccagcgcccacggcagatagggaccgaactgtctcacgacgttctaaacccagctcgcgtaccactttaaatggcgaacagccatacccttgggacctacttcagccccaggatgtgatgagccgacatcgaggtgccaaacaccgccgtcgatatgaactcttgggcggtatcagcctgttatccccggagtaccttttatccgttgagcgatggcccttccattcagaaccaccggatcactatgacctgctttcgcacctgctcgcgccgtcacgctcgcagtcaagctggcttatgccattgcactaacctcctgatgtccgaccaggattagccaaccttcgtgctcctccgttactctttaggaggagaccgccccagtcaaactacccaccagacactgtccgcaacccggattacgggtcaacgttagaacatcaaacattaaagggtggtatttcaaggtcggctccatgcagactggcgtccacacttcaaagcctcccacctatcctacacatcaaggctcaatgttcagtgtcaagctatagtaaaggttcacggggtctttccgtcttgccgcgggtacactgcatcttcacagcgagttcaatttcactgagtctcgggtggagacagcctggccatcattacgccattcgtgcaggtcggaacttacccgacaaggaatttcgctaccttaggaccgttatagttacggccgccgtttaccggggcttcgatcaagagcttcgcttgcgctaaccccatcaattaaccttccggcaccgggcaggcgtcacaccgtatacgtccactttcgtgtttgcacagtgctgtgtttttaataaacagttgcagccagctggtatcttcgactgatttcagctccatccgcgagggacctcacctacatatcagcgtgccttctcccgaagttacggcaccattttgcctagttccttcacccgagttctctcaagcgccttggtattctctacctgaccacctgtgtcggtttggggtacgatttgatgttacctgatgcttagaggcttttcctggaagcagggcatttgttgcttcagcaccgtagtgcctcgtcatcacgcctcagccttgattttccggatttgcctggaaaaccagcctacacgcttaaaccgggacaaccgtcgcccggccaacatagccttctccgtccccccttcgcagtaacaccaagtacaggaatattaacctgtttcccatcgactacgcctttcggcctcgccttaggggtcgactcaccctgccccgattaacgttggacaggaacccttggtcttccggcgagcgggcttttcacccgctttatcgttacttatgtcagcattcgcacttctgatacctccagcatgcctcacagcacaccttcgcaggcttacagaacgctcccctacccaacaacgcataagcgtcgctgccgcagcttcggtgcatggtttagccccgttacatcttccgcgcaggccgactcgaccagtgagctattacgctttctttaaatgatggctgcttctaagccaacatcctggctgtctgggccttcccacatcgtttcccacttaaccatgactttgggaccttagctggcggtctgggttgtttccctcttcacgacggacgttagcacccgccgtgtgtctcccgtgataacattctccggtattcgcagtttgcatcgggttggtaagtcgggatgacccccttgccgaaacagtgctctacccccggagatgaattcacgaggcgctacctaaatagctttcggggagaaccagctatctcccggtttgattggcctttcacccccagccacaagtcatccgctaatttttcaacattagtcggttcggtcctccagttagtgttacccaaccttcaacctgcccatggctagatcaccgggtttcgggtctataccctgcaacttaacgcccagttaagactcggtttcccttcggctcccctattcggttaaccttgctacagaatataagtcgctgacccattatacaaaaggtacgcagtcacacgcctaagcgtgctcccactgcttgtacgtacacggtttcaggttctttttcactcccctcgccggggttcttttcgcctttccctcacggtactggttcactatcggtcagtcaggagtatttagccttggaggatggtccccccatattcagacaggataccacgtgtcccgccctactcatcgagctcacagcatgtgcatttttgtgtacggggctgtcaccctgtatcgcgcgcctttccagacgcttccactaacacacacactgattcaggctctgggctgctccccgttcgctcgccgctactgggggaatctcggttgatttcttttcctcggggtacttagatgtttcagttcccccggttcgcctcattaacctatggattcagttaatgatagtgtgtcgaaacacactgggtttccccattcggaaatcgccggttataacggttcatatcaccttaccgacgcttatcgcagattagcacgtccttcatcgcctctgactgccagggcatccaccgtgtacgcttagtcgcttaacctcacaacccgaagatgtttcacttcagagttgcgaaaatttgagagactcacgaacaactttcattgttcagtgtttcaattttcagcttgatccagatttttaaagagcaaatatatcaaacaagacttaacagtctgttttgagatattgaggtcggcgactttcactcacaaaccagcaagtggcgtcccctaggggattcgaacccctgttaccgccgtgaaagggcggtgtcctgggcctctagacgaaggggacacgaaaattgcttatcacgcgttgcgtgatattttcgtgtagggtgagctttcattaatagaaagcgaacggccttattctcttcagcctcactcccaacgcgtaaacgccttgctattcacttttcatcagacaatctgtgtgagcactgcaaagtacgcttctttaaggtaaggaggtgatccaaccgcaggttcccctacggttaccttgttacgacttcaccccagtcatgaatcacaaagtggtaagcgccctcccgaaggttaagctacctacttcttttgcaacccactcccatggtgtgacgggcggtgtgtacaaggcccgggaacgtattcaccgtggcattctgatccacgattactagcgattccgacttcatggagtcgagttgcagactccaatccggactacgacgcactttatgaggtccgcttgctctcgcgaggtcgcttctctttgtatgcgccattgtagcacgtgtgtagccctggtcgtaagggccatgatgacttgacgtcatccccaccttcctccagtttatcactggcagtctcctttgagttcccggccggaccgctggcaacaaaggataagggttgcgctcgttgcgggacttaacccaacatttcacaacacgagctgacgacagccatgcagcacctgtctcacggttcccgaaggcacattctcatctctgaaaacttccgtggatgtcaagaccaggtaaggttcttcgcgttgcatcgaattaaaccacatgctccaccgcttgtgcgggcccccgtcaattcatttgagttttaaccttgcggccgtactccccaggcggtcgacttaacgcgttagctccggaagccacgcctcaagggcacaacctccaagtcgacatcgtttacggcgtggactaccagggtatctaatcctgtttgctccccacgctttcgcacctgagcgtcagtcttcgtccagggggccgccttcgccaccggtattcctccagatctctacgcatttcaccgctacacctggaattctacccccctctacgagactcaagcttgccagtatcagatgcagttcccaggttgagcccggggatttcacatctgacttaacaaaccgcctgcgtgcgctttacgcccagtaattccgattaacgcttgcaccctccgtattaccgcggctgctggcacggagttagccggtgcttcttctgcgggtaacgtcaatgagcaaaggtattaactttactcccttcctccccgctgaaagtactttacaacccgaaggccttcttcatacacgcggcatggctgcatcaggcttgcgcccattgtgcaatattccccactgctgcctcccgtaggagtctggaccgtgtctcagttccagtgtggctggtcatcctctcagaccagctagggatcgtcgccttggtgagccgttaccccaccaacaagctaatcccatctgggcacatccgatggcaagaggcccgaaggtccccctctttggtcttgcgacattatgcggtattagctaccgtttccagtagttatccccctccatcaggcagcttcccagacattactcacccgtccgccactcgtcagcgaagcagcaagctgcttcctgttaccgttcgacttgcatgtgttaggcctgccgccagcgttcaatctgagccatgatcaaactcttcaatttaaaagtttgatgctcaaagaattaaacttcgtaatgaattacgtgttcactcttgagacttggtattcatttttcgtcttgcgacgttaagaatccgtatcttcgagtgcccacacagattgtctgataaattgttaaagagcagtgccgcttcgctttttctcagcggcgcggggtgtgcataatacgccttcccgctacagagtcaagcatttctttgcttttctctgttgagattctcaggagaaccccgccgacccggcggcgtgtttgccgttgttccgtgtcagtggtggcgcattatagggagttattccggcctgacaagcgaaaaatataaaaactttatcgttcgctcacttttcaggcaaaacatcttaaatatagtcttttccgtctaacttatagacaaaaacgagccccgaagggctcgttttatcatttactggacggcgacaatccggtcttcattaacttccaggcgaatcactttacccggaaccaattcaccagacagtatttgctgtgccagcgggttttcgatctgctgctgaattgcacgtttcagaggacgtgcaccatagaccggatcgtaaccgttctcgctcagcagtttcagcgcctcgtcagaaatgtggatttcataaccacgttcttccagacgtttgtacagacgtttcaactgaatctgcgcaatcgaggcaatgtgctgttcacccagcggatggaagaccaccacttcatcgatacggttaatgaattccggacggaagttatggcttaccacaccgagcaccagctctttcatgtgcgcataatccagttcaccgaagcgttcctgaatcagatcggaaccgaggttagaggtcataatgacgaccgtattacggaagtcgaccgttctcccttgcccgtcagtcagacgcccatcatccagtacctgcaacagaatgttgaagacatccggatgcgctttttccacttcatccagcaggatgacggaatacggacgacgacgcaccgcttcggtcaggtagccaccttcttcataaccgacatatcccggaggcgcaccaaccaaacgagacaccgagtgtttctccataaactcggacatatcgatacggaccatcgcctcgtcgctatcaaacataaagttcgccagcgccttacaaagctctgttttccccacaccagttgggccgaggaacaggaatgaaccaatcgggcgatttggatccgccagccccgcacggctacgacgaatagcgttagataccgcatcaaccgcttcgttctgaccaattacgcgatggtgcagttcttgctccatacgcagcagtttttcgcgctcgctttccatcatgcgagaaaccggaatccccgtccaacgcgccagcacttcagcaatttcggcgtcggtcactttattacgcaacagacgcatagttttgccttcgagctgcgttgcggcttccagttgcttttccagttccgggattttgccgtattgcagttcagacatccgcgccaggtcccccacacggcgagcctgttcaatagcgattttcgcctgttccagttccgctttaatggtctgcgtaccagaaagcgatgccttctctgctttccactcttcttctaactcggagtactgacgttctttgtcgctcagttcttcgttgagcatatccagacgttttttactggcttcatcagactctttcattaacgcctgttgttccagtttgagctggatgatacgacgatcgagtcggtcgagttcttctggttttgagtcaatctgcatacgaatgctggatgctgcttcatcgatcaggtcgatggctttatccggcagctgacggtcagcaatgtagcgatgagacaacgtcgccgctgcaacaattgccgggtcagtaatttgcacatggtggtgcaattcgtaacgttctttcaggccacgcagaatcgcaatggtatcttcaacagaaggctcggcaacaaacactttctggaaacgacgttccagcgcagcatctttttcaatgtactggcgatattcgtcaagcgtcgtggcacctacgcagtgcaattcaccacgcgccagcgccggtttcagcatgtttccggcgtccattgcgccatcggctttacccgcgccgaccatggtatgtaattcgtcgataaataggatgacgttgccttcctgtttggcaagatcgttaagcacgccttttaaacgttcttcaaactcaccgcgatatttcgccccagccaccagcgcgcccatatccagcgccagtacccggcggcctttcaacccttccggcacttcgccgttgataatacgctgcgccagaccttcaacgatggcagttttaccgacgccgggttcaccaatcagtaccgggttatttttagtacgacgttgcagcacctgaatggtacggcgaatttcttcatcacgaccaatcaccggatcgagtttgccctgttcggctcgttcggtaaggtcgatggtatattttttcaaagcctgacgttggtcttcagcaccttgatcgttcacgctttcacctccacgcatttgttcaatcgcttgagtaatgttggcggtggtcgcccctgctgctttcaggatgtcggccagcgtgccgcgagactcaagtgccgccagaacgaacagttctgacgagataaagttatcaccacgtttttgcgccagcttgtcgcaaagattaagaacgcgcaccagatcctgtgatggctggacatcaccaccagtaccttcaacctgcggtaaacgatttaatgcctgattgatatctgtgcgcaactggccagcatttatgccagcggatgttaataaaggactaaccgaacccccttcctgattcagcagggcgctcattaaatgaagtggttcgataaattggttgtcgtgcccgagtgcaagtgattgggcatcggcaagagcaagctggaatttattagtaagacgatccagacgcataactcctcccataacggatcaaagttgctactggagattaaatgaggtcatccctcaattattcaaggttattgaccagattaatgtgaaaagaaaatcacgcgtaccggatcgtcttgattctttaggttatatcagccaaatgaaacttgccatacgaccggtggtcttgtcgcgacgataagagaagaaagtctcattttccgtatatgtacaacggtcgccgccgaaaatttgctcaacacccacgttcgccagacgctgccgggcaagctgataaatatccgccagatacttatcaccatgctgaatgaaagctgcacttgctttagcgtctactgccataaacgcctcgcgaacctccccccccacttcgaacgcgcgtggaccaattgccggccctaaccaggcgagaatattttccggattatcagcaaaacaggaaaccgtctcttccagcacgcctgcgcacagtccacgccagccagcatgagcggcggcgacttccgttcccgctcgattgcaaaacagcacagggaggcagtcggcagtcatcactgcgcaaaccgtgccgggcgtattgctataagaggcatccgcccgttttgaggcataaggttcgccagtgagcttaagcacatctttgccgtgtacctgctcaagccagaccggtttagaaggcaaattgcccgcagcaaaaagtcgcttgcgattctcctcaacgtgatccgggttatcgccacaatgggcaccgaggttgagtgagtcatacgggggcaagctcacgccgccgatacgagtggagctacaggccgcaacaccttttggctgcggccactgcgggacaatcagcttactcataaccagtccacttcatccttatgttcttcgaaatcggcgcgcatcacctcaatcagctccaccatatcttgtggaataggcgcatgccattccatttcgatgccggagatcgggtgataaagacgcagcatggttgcatgtagcgcctggcggtcaaacttacgcagcgtggagataaatgcttccgaagcaccttttggcggacgcggacggccaccataaaccggatcgcccaccagcggatgagtgatatgggccatatgcacgcggatctggtgcgtacgtccagtttccagacgcaaccgcagacgcgtgtgcacacggaagtgttccatgatgcgatagtgagtcaccgctggtttgcccatcggatgcaccgccatatgggtacgtttggtcgggtggcgactgattggctcgtccaccgtgccacctgcggtcatatgaccaatcgccaccgcttcatactcacgagtaatttcacgccgttgcaaagattcgactaaacgcgtctgagccggaacggtttttgccacaaccatcaggccagtggtgtctttatccagacgatggacgatgcccgcacgcggtacatcggcaatgggtggatagtaatgaagcaacgcattcagtaccgtgccatccgggttacccgcgccaggatgtaccaccaggtcgcgcggtttattaatgataataatgtcttcatcttcatagacgatatccagcgggatatcctgcggttcaaaacgcgcttcttcttcaatctcagcgttgatggcaacctgctcgccacccaatactttttctttcggcttatcacaaactttgccgttaaccagcactcgctggtcgaggatccattcttttattcgcgaacgtgaataatccgggaacatttcggccaaagcctgatctaagcgttgaccgagttggttttcggacaccgttgcagtgagctgtactcgttgtgccatatatactgcttcttcgtttatcgttggggttttacggctttgccgtttaatatagtgtgctattgtagctggtcttaaccgggagcaggaacagagaatctcccgtattacattttgaggaaagtcaaaacgtcatgacgcgcatgaaatatctggtggcagccgccacactaagcctgtttttggcgggttgctcggggtcaaaggaagaagtacctgataatccgccaaatgaaatttacgcgactgcacaacaaaagctgcaggacggtaactggagacaggcaataacgcaactggaagcgttagataatcgctatccgtttggtccgtattcgcagcaggtgcagctggatctcatctacgcctactataaaaacgccgatttgccgttagcacaggctgccatcgatcgttttattcgccttaacccgacccatccgaatatcgattatgtcatgtacatgcgtggcctgaccaatatggcgctggatgacagtgcgctgcaagggttctttggcgtcgatcgtagcgatcgcgatcctcaacatgcacgagctgcgtttagtgacttttccaaactggtgcgcggctatccgaacagtcagtacaccaccgatgccaccaaacgtctggtattcctgaaagatcgtctggcgaaatatgaatactccgtggccgagtactatacagaacgtggcgcatgggttgccgtcgttaaccgcgtagaaggcatgttgcgcgactacccggatacccaggctacgcgtgatgcgctgccgctgatggaaaatgcataccgtcagatgcagatgaatgcgcaagctgaaaaagtagcgaaaatcatcgccgcaaacagcagcaatacataacagaaacctgaaacacaaaacggcagcccttgagctgccgtttttttattctgtcagttgtgaaactgaagcgatttagtcgctatcgatctcatcaaatatggctcgctttgagatattcctcaagtaaaaaaacatctcttcctgcgatttctcacaaaaaagattcgttgacaaaaagtgacaaaattatgagattttcatcacacattttgacatcaggaacggtatgctgaattcaccaagacgggaagacaagaggtaaaatttatgacaatgaacattaccagcaaacaaatggaaattactccggccatccgccaacatgtcgcagaccgtctcgccaaactggaaaaatggcaaacacatctgattaatccacatatcattctgtccaaagagccacaagggtttgttgctgacgccacaatcaatacacctaacggcgttctggttgccagtggtaaacatgaagatatgtacaccgcaattaacgaattgatcaacaagctggaacggcagctcaataaactgcagcacaaaggcgaagcacgtcgtgccgcaacatcggtgaaagacgccaacttcgtcgaagaagttgaagaagagtagtcctttatattgagtgtatcgccaacgcgccttcgggcgcgttttttgttgacagcgtgaaaacagtacgggtactgtactaaagtcacttaaggaaacaaacatgaaacacataccgtttttcttcgcattcttttttaccttcccctgaatgggaggcgtttcgtcgtgtgaaacagaatgcgaagacgaacaataaggcctcccaaatcggggggccttttttattgataacaaaaaggcaacactatgacatcggaaaacccgttactggcgctgcgagagaaaatcagcgcgctggatgaaaaattattagcgttactggcagaacggcgcgaactggccgtcgaggtgggaaaagccaaactgctctcgcatcgcccggtacgtgatattgatcgtgaacgcgatttgctggaaagattaattacgctcggtaaagcgcaccatctggacgcccattacattactcgcctgttccagctcatcattgaagattccgtattaactcagcaggctttgctccaacaacatctcaataaaattaatccgcactcagcacgcatcgcttttctcggccccaaaggttcttattcccatcttgcggcgcgccagtatgctgcccgtcactttgagcaattcattgaaagtggctgcgccaaatttgccgatatttttaatcaggtggaaaccggccaggccgactatgccgtcgtaccgattgaaaataccagctccggtgccataaacgacgtttacgatctgctgcaacataccagcttgtcgattgttggcgagatgacgttaactatcgaccattgtttgttggtctccggcactactgatttatccaccatcaatacggtctacagccatccgcagccattccagcaatgcagcaaattccttaatcgttatccgcactggaagattgaatataccgaaagtacgtctgcggcaatggaaaaggttgcacaggcaaaatcaccgcatgttgctgcgttgggaagcgaagctggcggcactttgtacggtttgcaggtactggagcgtattgaagcaaatcagcgacaaaacttcacccgatttgtggtgttggcgcgtaaagccattaacgtgtctgatcaggttccggcgaaaaccacgttgttaatggcgaccgggcaacaagccggtgcgctggttgaagcgttgctggtactgcgcaaccacaatctgattatgacccgtctggaatcacgcccgattcacggtaatccatgggaagagatgttctatctggatattcaggccaatcttgaatcagcggaaatgcaaaaagcattgaaagagttaggggaaatcacccgttcaatgaaggtattgggctgttacccaagtgagaacgtagtgcctgttgatccaacctgatgaaaaggtgccggatgatgtgaatcatccggcactggattattactggcgattgtcattcgcctgacgcaataacacgcggctttcactctgaaaacgctgtgcgtaatcgccgaaccagtgctccaccttgcggaaactgtcaataaacgcctgcttatcgccctgctccagcaactcaatcgcctcgccgaaacgcttatagtaacgtttgattaacgccagattacgctctgacgacataatgatgtcggcataaagctgcggatcctgagcaaacagtcgcccgaccatcgccagctcaaggcggtaaatcggcgaagagagcgccagaagttgctcaagctgaacattttcttctgccaggtgcagcccgtaagcaaaagtagcaaagtggcgcagtgcctgaataaacgccatattctgatcgtgctcgacggcgctaatacgatgcagccgagcgccccagacctgaatttgctccagaaaccattggtatgcttccggtttacgtccatcacaccagaccacaacttgctttgccaggctaccgctgtccggaccgaacatcgggtgtagccccagcaccggaccatcatgcgccaccagcatggcctgtaatggcccatttttcactgatgccagatcgaccagaatacaatctttcggtaaaggcggtaatttgccaataacttgctcagtaacgtggattggcacactaacaatcaccattccggcatcggcaacaatatcagccgctcgatcccagtcatgttgctccagaatccgcacctgataacccgagagggtcagcatcttctcgaacaggcgtcccatctgaccgccaccgccgacgataaccaccggacgcagtgacggacaaagtgttttaaatcctttgtcgttttcactggagtaagattcacgcatcacccgacgcaaaacatcctcaatcagatctggcggtacacccagagcttccgcctctgcacgacgcgaggccaacatagatgcctcgcgctccggaacataaataggcagtccaaagcggcttttcacctcgcccacttcagcaaccagttccagacgcttcgctaataaattcagcagcgctttatcgacttcatcaatttgatcgcgtaatgcggtcaattcagcaaccataataaacctcttaagccacgcgagccgtcagctgcccgttcagatcctgatgaatttcacgcagcaaggcatcggtcatttcccagctaatgcaggcatcggttacggatacaccgtatttcatttcactgcgcggttgctcggaagactgattgccctcgtggatattactttcgatcatcagaccaataattgagcgattgccatctttgatttgagcaaccacggattctgccaccgcaggctgacggcgataatctttattggaattaccgtggctgcaatctaccatcagagacgggcgcagtcccgcctgttccatctctttttcacattgcgcaacatccgcagggctatagttcggcgctttaccaccgcgcaggatcacatggccgtccggattcccctgagtttgtagcaacgcaacctgccctgcctggttaatgccaacaaaacggtgcggctgggcggcggcgcgcatagcgttaattgctgttgccagactgccgtcggtgccgtttttaaaaccaaccggcatggaaagcccggaggccatttcacggtgagtttgcgattccgttgtacgagcaccaattgctgaccagctaaacagatcgcccaggtattgcgggctattcggatctaacgcttccgtcgccagtggcagtcccatattcaccagctcaagcagcaatttacgcgcgatctgcagcccggcttctacatcaaaagagccatccatatggggatcgttaattaaccctttccagccgacagtggtacggggtttttcaaaatagacgcgcattaccagatagaggctatcgctgacctctgcggcaagggctttaaatcgacgagcatattccagagcagtttccggatcatgaatggaacaaggaccacatactaccagcagacgaggatcgcgcccggcgataatatctgaaatgcttttacgcgagtcagcaatctgggcttcttgttgcaggctcaatggaaaagcggccttcagttgttccggagtcattaaaacctgttcgtcggtaatatgtacgttattcagcgcgtctttttgcatgatggcgatcctgtttatgctcgtttgcgatagttgatcctcagcgaggatgacgtaacgataacacataaagtaaagttttcaatccatatttcgtacatttttatttacacaggcaatttagtcgcgctttcaacccttacctctgtatagataaatttacactccctttgaaaacaatccgctatgctttgaaaaaggagaaagaaatgatgaaaaagtttatcgcccccttgttggctttactggttagcggatgtcagattgatccttatactcacgcgccaaccttgaccagcaccgactggtatgatgtcggtatggaagatgcgatatcgggcagcgccataaaagatgacgatgcatttagcgattcacaggcggatcgcggtctataccttaaaggatatgccgaaggacaaaagaaaacttgccagaccgattttacttatgcccgaggactttccggtaaaagctttcctgccagctgcaacaatgttgaaaatgccagccaactgcatgaagtatggcaaaaaggggctgatgaaaatgccagcacaatacgattaaattaattaaaaccccacaaataaattaaacataagattttactcattgtgttttatttctcacattgatgacggtcgcatgaaaaaatgatattttaatgagcattctgaaaaaatatcgatgcatttcgagcgaagatggtggggatccctgaatgcgtttttctcaccgactgttcttacttctgattctcctgctgacgggagcaccaatactcgctcaggagccttctgacgttgcgaaaaacgtgcgtatgatggtttccggtattgtcagttacacccgctggcctgcgctatcagggccaccaaagttatgtatcttttcatcttcacgttttagtaccgccctacaagagaatgccgcgacatctttgccttatctgcctgtcatcattcacactcaacaagaggcgatgatttcaggctgcaatggtttttattttggcaacgagtcaccgacattccagatggaattaaccgaacaatatccgtcaaaggcgttattattaattgccgaacaaaataccgagtgcattattggtagcgccttttgtctgatcatccacaataatgacgtcagatttgccgtaaacctggatgccttatcgcgtagcggtgtaaaggtcaacccggatgtcttaatgctcgcacggaagaaaaatgatggataacgataattctcttaataagcgccccacgtttaaaagagcattacgcaacatcagtatgaccagcatatttatcactatgatgctgatctggttgctgctttccgtgacctcggtgctgaccctgaaacagtacgcgcaaaaaaacctggcactgacagcagcaacaatgacttacagtctggaagcagctgtcgtttttgccgatggccctgcagcaactgaaacactggcagcgctgggccagcaagggcaattttcaactgcagaagtacgtgataagcagcaaaatattctggcatcctggcattacacccgtaaggatccaggcgatactttcagtaatttcataagccactggctcttccctgcccccatcattcagccgattcgtcacaatggtgaaaccattggcgaagtacgcttaaccgctcgcgacagttcaatcagccattttatctggttttcgctcgccgtactgaccggttgtattctgctggcatcaggcatcgcaattaccctcacccgccatttgcacaatggcctggtagaagcgctgaaaaatatcaccgatgtcgtacatgatgtgcgttccaaccgcaatttttcccgacgagtttcggaagaacgtatcgctgagtttcaccgcttcgctctcgacttcaacagtctgctggatgaaatggaagagtggcagcttcgtttacaggctaaaaatgcgcagcttctacgtaccgcgctacatgacccattaaccgggctggctaaccgcgcagcgtttcgtagcggcatcaacacgttgatgaacaattccgatgcccgaaaaacgtcggcgttactatttcttgatggcgataatttcaaatacatcaatgatacctggggtcatgcgacgggcgatagagtcttgattgaaatcgcaaaacggttagctgaatttggcgggctgcgacataaagcataccgcctgggcggcgatgaattcgctatggtgctctatgatgtacagtcggaatctgaagtgcagcagatatgttcagcactgacacaaatctttaatctcccgtttgatcttcataatggccatcagaccaccatgacattaagcattggttacgcgatgaccattgagcacgcctctgcggaaaaattacaagagcttgccgatcacaatatgtatcaggccaaacaccagcgtgccgaaaagctggtgagataacaaggatatatcgatatgataaagcacctggtagcacccctggttttcacctcactaatactgactggctgccagtcccctcagggaaagtttactcctgagcaagtcgccgctatgcaatcttatggatttactgaatccgccggcgactggtcgctgggcttatcagatgccattctgttcgcaaaaaatgactacaaattgctcccggaaagccagcaacagatccaaaccatggcagctaaattggcctcgacagggctaacacatgcccgtatggatggacacaccgataactatggtgaagacagttacaacgaaggcttatcattgaaacgggcgaatgtcgtggccgatgcatgggctatgggtggacaaattccacgcagcaatctcaccacacagggtttaggaaaaaaatatcccatagccagtaacaagaccgcccagggccgcgccgagaaccgccgcgtcgcagtggtgattactaccccttaaaacaccagcaaacagataaaaaagggccagccaattggccagcccttcttaacaggatgtcgcttaagcgaaatcttagttaagacgctctttgatacgagcagccttaccagtacgctcacgcaggtagtacagtttagctttacgaacagcaccacgacgtttgacagaaatgctgtcaactaccggagagtgagtctggaagacacgctcaacgccttcgccgttggaaattttacgaacagtgaatgcagagtgcagaccgcggttacgaatagcgataaccacgccctcgaatgcctgcagacgttttttggaaccttcaacaacccatactttcacttccacggtatcacccggacggaaggaaggtacgtcctgcttcatctgctcttgttcaagttgcttaataatgttgctcataatttaatctcttatcctgggtaaactgatatctcgggggcttacgccatcccatcatgtttatgttgctgttgtgcgtgttccgttttgaactccgccagcaaccttgcttgctcttcagtcagagccaggttttccagaagttcaggtcttctaagccaggtacggcccagcgactgtttcaaacgccagcgacgtatctcggcatggttgcccgacagtaacactggcggaacttccatcccttctaacacctcaggccgcgtatagtgcgggcaatccagcaatccttcagcaaaggaatcttccgttgccgaggcttcatgtcccagtactcccggaataaaccgggaaacggagtcaatcagcgtcattgctggtaactcaccaccactgagaacgtaatcgccgattgaccattcttcgtcaatttcggtttggatcacgcgctcatctataccttcgtagcgaccgcacaccagaatcaatttttgattcgttgccagttcgctgacgcccgcttgatcaagcttgcgtccctgtggtgacagataaatcacctttgcgccttcacccgccgcggcttttgctgcatgaatggcgtcccgcaagggttgcaccatcattaacatccccggtccgccgccgtaaggacgatcgtccacggtacggtgccggtcatgcgtgaagtcgcgaggactccagctctggatgctcagcaggccatttttaactgcccggccagttaccccgtaatcggtaattgcgcggaacatttcaggaaacaggctaattatgccaatccacatagcgccgtcttttaccgtttatccggtggtttaaaaaccaggatcccaatctacttcgattgaacgagtagtgagatcgactttcttgataacctgcccatcgaggaacggtacgagacgttccttgataccaaacgcatctttcaggtttgccttaatgacgagaacgtcattagatccggtttccatcatatcgacgactttaccgagatcgtagccttcagtggttactacctggcagcccatcaggtctttccagtagtagtccccctcttcaagctgaggcagctgcgatgaatccacgacaatttcacaattcgtcagcaggttcgccgcatcacgatcgtcaacgcctttcagcttgatgatcatgtcctgattgtggtgcttccagctttccagctggacttgctgccactgacccgccttctggataaaccagggctgatagtcaaaaatgctttcggcgtcttcggtggaagaaaacactctgagccacccacgaataccgtaagacgaacccatttttcccaaaacgatgggatcaacaggtgcttgcgcggtgagttgtttgctcatcatgaccaccgtgacagattaagctgctttgtttacttctttgatcagcgcagcaacgcgatcagaaatagttgcgccctggccaacccagtgagcgatgcgatccagatccaggcgagtgccttcttctttttcgctagcgattgggttgaagaaaccaacgcgctcgatgaagcgaccgttgcgtgcattacggctgtcagcgacaacaacctggtagaacggacgctttttagcgccgtgacgtgctaaacgaatagttaccataacatcctcttgtgtgaataaaacaaccggaccccatcgaggaacggagtccggtgtcatattaaaagcccgaaaattttactcatttttgcgggaattgcaatcaacagttgctaactctgctgtaaaaggccgtcggcggtgcagccagtttggtgccggagtgcgcgcagtcaccggagcgtacacgcagtacgtgaggatgacgagcacatcccggtgccaaaatggcaaacaagccaggccgattagcgaccagggaagcctgggggcatcatacccttcatgcttctcatcatcttcgccattccgcccttcttcattttcttcatcatgcgctgcatgtcgtcgaactgtttcagaagacggttaacgtcctgcacctgcataccgcaaccggcagcaatacggcgtttacgcgaacctttgatgatttctggcttagcgcgctctttcatcgtcatcgagttgatgatggcttccatacgcaccagcactttatcgtccatctgtgacttgacgttatccgggatctgccccatgcccggcagcttgcccatcagactagccatgccgcccatatttttcatctggcgcagctgctcaagaaagtcgttgagatcgaagccgtcaccttttttcagcttgctggctaatttctctgcctgcgcgcggtcaactttgctttcgatatcttcgatcagcgacagtacgtcgcccatgccgagaatacgcgacgcgatgcggtccggatggaacggctccagcgcctcagttttctcgccaacaccgaggaacttgatcggtttgccagtgatgtgacgaatagagagcgccgcaccgccgcgggcatcgccgtccactttggtcaacactacgccggtaagcggtaacgcttcattgaatgcttttgccgtattggccgcatcctgaccggtcatggcgtcaaccacaaacagggtttcaaccgggttaatcgacgcatggacttgtttgatctcgtccatcatcgcttcgtcaacgtgcagacgaccagcggtatccaccagcagcacgtcgtagaatttcagtttggcttctttcagcgccgcgttaacgatatctaccggcttctgaccaacatcagaagggaagaaatcaacgcccacctgctctgccagcgtctcaagctgtttgattgccgccgggcgataaacgtcggcagaaaccaccagcactttcttcttgtgcttctcgcgcaggaacttaccgagtttaccaacgctggttgttttaccggcaccttgcaggcccgccatcagtacgaccgcaggcggttgcgcagccaggttcagggtctggttctcttcgcccatcgccgcaaccagttcgttacggactattttgacgaactcctgccccggcgtcaggctcttattaacttcatgaccaaccgctttctcttttacgcgattgataaactcacgcactaccggcagagctacgtccgcctccagcagcgccatgcgcacttcgcgcagcgtatcttttacgttgtcttcagtgaggcgtccacggccactgatattgcgcagcgtgcgcgacaaacgatcggttaaattatcaaacattgtctctcgcctggggtggaaacggttggccgcaatcgcgacacatcatcagtattttgccgcagtataacatgaaggcgtctttgttgttatgcaacggttggagcagcgttcacctgacgctatactgcttctctttcttattgctcaaactgtcgacatcactatgcccgtttttgctctgctcgcgcttgtcgcctactccgtcagtcttgcgctgattgttcccggtctgctgcaaaaaaacggcggctggcggcgcatggctattatttctgcggtcattgcgctggtctgccacgcaatcgctctggaagcccgcatcctgcccgacggtgatagcggacaaaacctcagcctgctgaacgttggttcattggtcagtttgatgatctgtacggtaatgaccattgtggcttctcgcaatcgtggctggctgctgctacccattgtctatgcctttgcgcttatcaacctggcgctggcaaccttcatgcccaatgaatacatcacccatctggaagctacgcctgggatgctggtgcacattggcttatcgctcttttcctatgccacgctaattatcgccgccctgtacgcactgcaactggcgtggattgattaccaactgaagaacaagaagctggcgtttaaccaggaaatgccgccattgatgagtatcgagcgtaaaatgttccacatcacgcagattggcgtggtgctgctaacgctcacgctttgcactggcctgttctacatgcacaacttatttagcatggaaaatatcgacaaggctgtgctctctatcgtggcgtggtttgtctatattgtgctgctgtggggacattatcatgaaggatggcgtggacgccgcgtcgtctggtttaacgttgcgggcgcggtaattctgacactggcctacttcggcagccgaattgtccagcagttaatcagctaaacccagaaaaggagtttcccctggaacacatttctactactacgttgatcattattctgatcatcatggtggtcatttcagcctatttttccgggtccgaaaccggaatgatgaccctcaaccgctatcgtctgcgacatatggcgaaacagggtaatcgctcggccaaacgcgtcgaaaaattgctgcgtaagccagaccgcctgataagcctggtgttaatcggcaataacctggtcaatattcttgcctccgcgctcggcactattgttgggatgcgtttgtacggcgatgcgggcgtggcaattgcgactggtgtgctgacttttgtcgtactggtatttgctgaggtattgccgaaaaccattgccgcgctgtacccggaaaaagtcgcttatccgagtagttttctgctggctccgctgcaaattttgatgatgccgctggtctggttgctgaatgctatcacccgtatgctgatgcgcatgatgggtatcaaaaccgatatcgtggttagcggctctttgagcaaagaagagttgcgcactatcgtgcacgaatcacgctcacaaatttcccgtcgcaatcaggatatgctgctgtcggtgctcgatctggaaaaaatgaccgttgatgacatcatggtgccgcgcagtgaaattatcggtattgatatcaacgatgactggaaatcgattctgcgccaactctcccactcacctcacgggcgcatcgtgctctaccgtgattcgctggacgacgccatcagtatgctgcgagtacgtgaagcctggcggttgatgtcggagaaaaaagagttcaccaaagaaaccatgctgcgcgccgcggacgagatctattttgtgccggaaggtacgccgctcagcacgcagttggtaaagtttcagcgcaacaaaaagaaagtcggcctggtcgtcaacgagtatggagacattcaggggctggtgacggttgaagatattctggaagagattgtcggcgatttcactacgtcgatgtcgccaacacttgccgaagaggtcacgccgcaaaacgacggttcggtgattatcgatggcaccgccaacgtgcgggaaatcaacaaagcctttaactggcatctaccggaagatgatgcccgcacggttaatggcgtcattcttgaggcactggaagagatccctgtcgcaggcacccgcgtgcgtattggcgagtacgatatcgatattctcgacgtacaggacaatatgattaagcaggtaaaagtttttcctgtgaaaccgctgcgcgagagtgtggcggagtaacgaaaacggcccggcattcgcatgcagggccgtgaattattacgaaagcagaaattaagcttttgctttcgctacagtaaccatcgccgcacgaatcgtacgaccattcagcgtataacccttctgcataatgcccagtacgttacctggcgcaacgtcatcagattccaccattgcgatggcctgatgcacattcgggtccagtgggacgttagtttcggcgatcacttcaacgccaaacttacgcacaacatccagcatcgacttcagcgtcagctcaatgccttcaaccatcgcagacatatccgggttagctttatcagccacttccagcgcacgatccaggctatcaatcaccggcagcaattcgttgatgaatttctccagcgcgaatttgtgggctttttcaatatccagttcagtacgacgacgcaggttttccatttcggcttttacacgcaaaatgccgtcacgttcacgggtctgggcttcagccagctgagcttcgagattcgcaactttttcatcgcgcggatccacctgctcagcagaagcttctggctcaactgcctcaatctcttcgtgctgatccatgataatttcttccggggcttgcccctcaggcgttttctgttctttactactcatgaatttctccgcgtttttttcgcattcatctcgctaacttcgcttattatggggatcagtttcagggtttcaagggaagcactcacattgtcatcaatcttcgcaacaaggacctcggaaaaatgaataatcatttcaagtgtattggcattgtgggacacccacggcaccccactgcactgacaacacatgaaatgctctaccgctggctgtgcacaaaaggttacgaggtcatcgttgagcaacaaatcgctcacgaactgcaactgaagaatgtgaaaactggcacgctcgcggagattgggcaactagctgatctcgcggtagtcgttggtggcgacggtaatatgctgggcgcggcacgcacactcgcccgttacgatattaaagttattggaatcaaccgtggcaacctgggtttcctgactgaccttgaccccgataacgcccagcaacagttagccgatgtgctggaaggccactacatcagcgagaaacgttttttgctggaagcgcaagtctgtcagcaagattgccagaaacgcatcagcaccgcgataaatgaagtggtgcttcatccaggcaaagtggcgcatatgattgagttcgaagtgtatatcgacgagatctttgcgttttctcagcgatctgatggactaattatttcgacgccaacaggctccaccgcctattccctctctgcaggcggtcctattctgaccccctctctggatgcgattaccctggtgcccatgttcccgcatacgttgtcagcacgaccactggtcataaacagcagcagcacgatccgtctgcgtttttcgcatcgccgtaacgacctggaaatcagttgcgacagccagatagcactgccgattcaggaaggtgaagatgtcctgattcgtcgctgtgattaccatctgaatctgattcatccgaaagattacagttatttcaacacattaagcaccaagctcggctggtcaaaaaaattattctaattttacgccagcctctttactgtatataaaaccagtttatactgtacacaataacagtaatggtttttcatacaggaaaacgactatgttggcacaactgaccatcagcaactttgctatcgttcgtgagcttgagattgattttcatagcggcatgaccgtaataactggcgagaccggcgcgggtaaatctattgcaatagatgccctcggtctttgtctcggtggtcgcgctgaagccgacatggtgcgtaccggcgctgctcgcgctgacctgtgcgcccgtttttctctgaaagatacgccagcggctctgcgctggctggaagaaaaccagcttgaagacgggcatgaatgtttgcttcgtcgcgtgatcagcagcgatggtcgctcccgtggtttcatcaacggtacagctgttcctctgtcacaactgcgcgaactgggtcagttgctgattcagatccatggtcagcacgctcatcaattactcaccaaacctgagcaccaaaaattcctgcttgatggctatgccaatgaaacctctctactgcaggaaatgaccgcacgttatcagttgtggcatcaaagctgccgtgacctcgcgcatcatcaacagttaagtcaggaacgcgccgcccgtgcggaactgctgcaataccaattaaaagaacttaacgaatttaatccgcagcccggagagtttgaacaaatcgacgaagagtacaaacgtctggcgaacagcggtcaattgctgaccaccagccagaatgcattggcattaatggccgacggtgaagacgcaaacctgcaaagtcagctttacacggctaaacaactggtgagcgaattgattggcatggacagcaaactgtccggcgtacttgatatgctggaagaagctaccatccagattgctgaagccagcgatgaactgcgccactactgcgatcgtctggatctcgatcccaaccgactatttgaacttgaacagcgcatctcaaaacagatttcgctggcacgtaaacatcacgtcagccctgaggcattgccacagtattaccagtcgctactggaagaacagcagcaactggacgatcaggccgactcacaagaaacgcttgcgctggcggtaacgaaacatcatcagcaggcactggaaatcgcgcgcgcattacaccaacaacgccagcaatatgcagaagaacttgcacagctgatcaccgacagtatgcatgcgctctcaatgccgcatgggcagtttacgatcgatgttaaatttgacgagcatcacctgggcgctgacggtgccgatcgtattgagtttcgggtaaccaccaacccaggtcagccaatgcagcctattgccaaagtcgcatccggtggtgaattgtcccgcatcgcactggcaatccaggtcatcacggcgcgtaaaatggaaaccccggcactgatttttgatgaagtggatgtagggattagcggtccaacagcggcagttgtcggcaaactgctgcgtcaactcggcgaatcaactcaggtgatgtgtgttacccacctgccacaagtcgcgggatgtggtcatcaacactattttgtcagcaaagaaaccgatggtgcgatgacagaaacgcatatgcaatccctgaataaaaaagcgcggttacaagagctggcgcgcctgcttggtggcagtgaagtcacacgtaatacactggcgaatgcgaaagaactgcttgcagcgtaaacttttttcctgcttcacggtcagagtaaacagcaaaacgccgtaagaccggaaagcaaaaggttttaaagtgatgaaaggtctattatcatcggcatattacagatgagccacgtactgctcgggcccgaaaaggaatcaaatcactatgcgctgtaaaacgctgactgctgcagcagcagtactattgatgttgaccgcaggctgttccactctggagcgagtggtttaccgtcctgacatcaaccaggggaactatctgaccgctaacgacgtatccaaaatacgtgttggcatgacgcaacaacaagttgcgtacgcattgggtacaccgctgatgtccgatccatttggtacgaatacctggttctatgtcttccgccagcaaccaggtcatgaaggtgtaactcagcaaacgctgacgctgacctttaacagtagcggtgtgttgaccaatattgataacaaacctgcgctgagtggtaactaataataaagttgctctcaaagacgttaaaaaaggtgctcaatgagcaccttttttctgtctgttatttattcgctgatttttctgctcgttgcctgcgaagctctttcggatcggcaatgagagggcgataaatctccacccgatcgccatcatgcacactatcgcttagttttgccggacggctgtaaatgccgactttgtttttagttaaatcgatatcggtacgcaattccagcaagccactggcgcgaatagcttcttcaaccgtcgcgccctcctgcagcgtcactcgctgcaggtactgcttctcaggtagcgcataagccacctcaacggcaattttacctggcactgtaaacctctttcgcacgaaccgtaaaagcctggaccatattagccgccagctctttaaacacgcgaccaaaggcgagttcaatcaacttattggtaaactcaaagtcgagatgaaactcgatacgacacgcctcctggctcagcggcgtaaacttccatccaccaatcaatttcttgaacggcccatccaccagattcataagaatactttggttactggtcaactggttgcgggtagtaaacgttttgctgatcccagccttagagacatctaccgccgcagtcatctgcccaggagtggactccagaatccgacttccggtacaacccggcaaaaactgaggataagactgaacgtcattcactaactgatacatttgctccgcgctgtagggtaccagtgcggtccggctaatctgaggcataacaatttccatcaacaaaaatccaacaaataatatcatttatcctgctgtaaaaaaaacgctatcccggcgctgggtaacatcgggttcatgctaagatagagccttgtcccccgcaggattgatatggggtgttttcgatttcagattaccgatgattcacgacgcttatgacgaagaaaaaagcacataaacctggttcagcgaccatcgcgcttaacaagcgcgcccgtcacgaatactttatcgaagaagagttcgaagcgggacttgccctgcaaggctgggaagttaaatccctgcgcgcaggaaaagccaatatcagcgacagctacgtccttctgcgtgacggagaggcatttctgtttggcgctaacatcacgccaatggccgtggcctccacgcatgtggtgtgcgatcctacccgtacccgcaagttacttctcaaccagcgcgaactggactcattgtacggtcgcgtcaatcgagaaggctataccgtagtggcgctctccctgtactggaaaaatgcctggtgcaaagtgaaaatcggcgtcgccaaaggtaagaaacagcacgataaacgttcagatatcaaagagcgcgaatggcaggtggataaagcacgtatcatgaaaaacgcccaccgttaaacctgcactccaattattgaccagttcctcaccgcgcctccctctccggcggcgcgaatgaacatcttattggctatcacatccgacacaaatgttgccatcccattgcttaatcgaataaaaatcaggctacatgggtgctaaatctttaacgataacgccattgaggctggtcatggcgctcataaatctggtatacttacctttacacattggggctgattctggattcgacgggatttgcgaaacccaaggtgcatgccgaggggcggttggcctcgtaaaaagccgcaaaaaatagtcgcaaacgacgaaaactacgctttagcagcttaataacctgcttagagccctctctccctagcctccgctcttaggacggggatcaagagaggtcaaacccaaaagagatcgcgtggaagccctgcctggggttgaagcgttaaaacttaatcaggctagtttgttagtggcgtgtccgtccgcagctggcaagcgaatgtaaagactgactaagcatgtagtaccgaggatgtaggaatttcggacgcgggttcaactcccgccagctccaccaaaattctccatcggtgattaccagagtcatccgatgaagtcctaagagcccgcacggcgcaagccctgcgggcttttttgtgccctcaatttgtcccgcgaagtccgaagagaactaattaaatccgaaccttttaggcccattgataggcccaacgaaaagctctattgtttacgttgggcctaaacgcagggagactccccatggcaagaaaaaccaagccgttaactgatacggaaatcaaagccgccaaacctaaagatgccgattaccagctttatgacggtgacgggcttactctgttaatcaagtccagtggcagtaagctttggcaattccgttactatcggcctttgaccaagcagcgaaccaaacagagcttcggtgcctatcctgccgtctcgctttctgatgcacgtaaactcagagccgaatctaaagttttattggcgaaagacattgatcctcaggaacatcagaaagaacaggtgaggaattctcaagaggccaaaaccaataccttcttgttagttgccgagcgttggtggaatgtgaagaaaaccagcgtaacagaggactatgccgacgatatctggcgctcgcttgagagagatattttcccggcaatcggtgatatcagtatcactgagattaaggctcatactctggttaaagcagttcagccggttcaggccagaggtgcattagagactgttcgccgcctttgtcagcgtattaacgaagtcatgatttatgcgcagaacacaggcctgattgatgctgttcctagtgtaaatatcggaaaagctttcgagaaaccgcaaaagaaaaacatgccaagcatccggccggatcaacttccgcagctaatgcacaccatgcgtacggcaagtatcagcatgtccacaagatgcctgttcatgtggcaacttctaaccatcacccgccctgccgaagctgctgaggctcgatgggatgagatcgatttcaatgctagcgaatggaaaattcctgcagctcaaatgaagatgaaccgggaccatacggttccactatctgatggggctcttgctattctggaaatgatgaagcctctcagtggtggccgagaatttatctttcctagccgtatcaagcccaaccaaccaatgaatagccaaacagtgaatgcagcactcaagcgtgctggcttaggaggtgtacttgtttcacacggcttgcgttctatcgccagtacggcactcaatgaggaaggatttccacctgatgtcattgaagcagcgcttgctcatgtagacaaaaatgaggtgcgtcgcgcttataaccgcagtgattatcttgagcaacgtcgtccgatgatgcaatggtgggctgatctcgtaaaagcagcagatagtggtagcatcgttttaactcatttgagcaaaattcgtcttgtcggataaaatatttatcagcccagctctctgggctgatatttctaaaagatcgcactaaatagctacgcggaatagtgctctactttcgtttagccctttcagaggtaagacattagggcaatttcactgtatgactgcgcagtcatcgagtctgtggggtgttgctccttttgcaacgtatcacttgtcaataaatagaaagtgtagatgtattaggcgcagctatttagtctatatggcaagtagtaattatttacttcttttttttctacgaacagcgctatcgaaagcttgttttacatcttcattttttaaagaccattgatttaaaatagtatcaaccaaagcatcttgactcattgttgctacacgatattttttattttgattatttatctcaaactctgacatttgaataaaatcccatagcggttcgataagttcattaactgctacaaccttatttttccacccatcattcggaacagagtcattaattagctcaaccaacttcagttgaatgatatggtacacttccgctttgcttttgccacccttctttcctgcactccgcctgacttctgataattttttttgattacaaacagagatgttaaaccaagtcatacctatgcacttatcaaataactccgcagcccgatgaaatgctttaaaggcaacgttttcattttcagacatgatagattttccccagaaaaaagagattgaggcgaacataaggtgtgccttgaaaatgtcattaatggaaaatggctcgataacaagaggtaaaaacgtttccttggtaaggtttgaacttagatttttccagcattcttgagctggatcatataattcagtgtattcttcctttatctccagttgcccattcactgtatggtgccttgtttcccatggtacatcgcaggaatataacctcacacgagtacctattttctcagagctccagaattgctctcgcattctgcctagctcaatccgtatttccggatgatcttcctctagaacatcagtatccaccgcccattcgcattcggacatgtgataggcgagatcacgtcgttttctacaaatttgttcataaaaatcattcagagaaatcataaaaccaccataaatcaatgtattagaggttgtaaaaattgtatttttggtacatgggttttttgccttaaagatacccattaatctctctgcaaccaaagtgaaccaatgagaggcaacaagaatgaacaatcgatcggccgttagaatactacggttaccagcggttatccaaaaaacaggtatggcacgggccaccatctatgactggttgaaccccaaatcaccacgatacgatgccacctttcccaaaaagcgaatgctcggcgtgaaatctgtcggatggattgaggccgagattgatgagtggttatcacaacgctgtaaacttatttgagggtgttacatgaattcatactcaattgctgtcatcggagtgtaaacatcctgctatttccgccattaatagcggaatagccatatttgctaaacaatttcttaatttaattaaataagaggcattgcatgttcaatggtcgtcctttccctgtagatgcatttcctaaaattatcaggaatgcaatttatgaagtggaacagcatacgcaggcccctcaaggtttgattgctgcttctgctcttggggtaatttctcttgcctgtcagaaccggattgatgtttgccgattgaataatctacgtggcccggtatcacttttcttaatgactctggctgaatcaggtgaacgtaagagtacggttgataaactgctgatgaagccattatatcaactggaagaggatttatttgaaaaatacacccacgatcttaccgcatggagaaatgatgaagcaatttttaatattgaaaaaaaagcactgatgtcaaaacttaaatcagatattcgacgtaacaaagatcacttggcaacaaatgaaagacttaaagaactacttacgacaaacccgaaagctccagtgagattcaaatttttatttaacgatgccacacctgcagctattaaagctcatctctgtgggcactggcgatcagtcggcatcatgtctgatgaagctgggatcatttttaatggttacacacttaacgagctgccgtttatcaataagatgtgggatggttcaatatttacggtggaaaggaaaaacgagcccgagaaattaattagagatgcaagaataacactgtcgctgatggtccagcctaatgtttttaagggttatatcgacaggaaaggagatatggcaaaggggattggattttttgcacggtgcctcatgtgccagcctgcttcaacacaaggtaacagaaaaatttccaacccaattttttcaaatgaacatttgccggtatttcaccaacgtcttatggaaattgttaatgagagcatcattaaaattaatgaaaataatcgcatctgcctccgattctctgcagaagcagaaagacattggatcgaattctacaaccaggtcgagtcagaaatgagaatgattggccttctttatgattttaaggattatgcttctaaaatggcggagaacatggcgaggcttgctgccttacttcattacttcagcggtgatggaggcgatatatctgttaccgcagtaaaagcagcagtggagatagtggcttggtatattgaagaatacatccgcttgttctctaaaaaagaagagttttctttagatgtttcagaagcagatgagctttattgttggataaaagattactgcacgcaaaaattttcttcctgcatcaagaaaaatattatcttacaatttgggccaaataaatttagaaatcgtgacaaggcaaatgaattaattagaatcttaatttcacaaaacaaaatatttatatcttcatggggtaaaacaaaaataataaacataactcattgtgttttttgattttaatgacaatctaaaaggacttaatttaagagtaaaaacaaactctaaacccagttcggataaaagcttgtcatcttgataggtaatatataggtacatagacacatcagaacgatcacttactccaatatcattggccaggatactatatgacatacgatagtgaattcggatcacatgtatccctatatcgggatagaatcaaacaggttattgatgactccctaaacgaacatcttaactcaatgattctacgtgttgatctgcatgacccaattgatacagaaaatatggataacccattctttcaacccagggttgactctggtgctatatctcgctttaccagtgcgttaaaagcaaagcttaaacatgataagcatattaaaactcaacggaaagactggcctgatagtcgacattccactttacgttacgcatgggtcagagaatataccaaaaatagaaagcggcattaccatttgatactgtgtttcaatcaggatgcttattatcatttaggtgattacgacttaaaccgtaacacgttacgtacaatgataacgacagcttggtacagtgcacttggcatccctatagatagctcggggaagttagttaattacccgccaaatggcaaataccttctcaatcgtaaaagggacaactttgagcagacttatagcgatttgatgaatagggtggattacatgaccaaagtaaggactaaaatagtcggtgacggagaccgtaatttcggctgcagtcgcgggtaatttattttttacaacaatggcctttcttatggctggaaaggcctgatttgtttgtattaagatatcggtaatcttttgatggttggaagcccgtcctggtagacgacctagcctaccgaagatgtgagttattcaaaaatgtcgctttcccgcgttccgtagacaaacgtacctaaatcaatgtcgtctaataccgagcgcgcgcctgataaacatctgatcaacgtacccaatcgatctactccaaatgtcctgagtatcccgaagatactggctcaactcatccacatcagcctcgtcggaaaattccagcaagtctaccagtcggtgtaacgtctgaatgggaatgccaatctcttctaaggcattgacacctggtggtagatggaaactttcgaacgccaatttgacatgtgtgtaatcgactttgctgcgtataccacgctttacagcgtggtgtttaactacatcctccatcaagctgagcaccttaggtagggtatagccgaaggtattggttatgagcttcaaatcattgttgagggcaatggaaagagtacgtttctccccttcagaaatccactgtcgtgcataatcgatctgatttttcagatattccgaataactttcagcacttaaatagccggcaagttttgcgatcatgacatccgtaggcttaacagggaccccattgcgactgaacgtatggggaaccagtctggcaatgatctttgcaaaggtcttgaggaagtttgtcgcgggagtccagtgaaacactaacgaggaaaattcgttatcgtccatcatctcgaacatgctttgcagcatttcgaactgctcgacacggaagtacgaatgcttcttcacaaggtcgatggaaacacggtcgtttatgaaaacctcatcaaagcgatcctgtgaaaactcggacaagtggtctggttgaacgctggctaacaggttgattggggtatcaatgccctgaataccgagcggaatatccacctcttgattgagattgtcttccgggatttcctccaggcaaaagattttgccgacgaagtgaacgcccatgcgcccggcgcgacctttgatgttcccatgggtgaatttgtcaatgctgcgagttccatcgcggttgtcgtagatcacaacgttcttagcgatagtgttgactccttcaatgatcgtggaggtgcagagcaaaaagcgcagttttccagcattgaattggtcggcagtgtattgctgcagtgccctcggtagcgcgccaaaatgcaagccaataccgtttctaagggcgactgtgtaatcccagtcggcatcgaactcttcgctgacccagtcgacatggggattctcagtcggagtgccatgcccaagcctgatcagctcgcgcgccaccaggcccgcaacagttggtgacttgcaataaatgatcgttgcgtcgacacatgcgtgcgcgatttcccccagcgctttgagcttggctttgtcgtcattcgctttgatgccgaacgtcttaacatctagcgcgactgtattgaagtcggtagaaacgaaagtatgcggatatccaagtttttcgagaccgcgaatgctgttaacgaacggtcccgtcaggtaaaactgcctggagaccttaagcagtttgcttaacgcaatgttgagctcgatgactcgttcgtcttgatgatcaatgtccccgcttttcagttgtcggaacgccaacttgtaaaactcgtcaatgacgaagaggtcaatgtcgacgatgtcgtcacgctcgttcactcgctcctgagttaacacataaacagcctgatcggaatggcacacttgggaactgtggtggatgatctgatatcggtcaccgaatcgctcttgcagtcggcgacgggtttcgtcggcaagagccacggttggaacaaccagaacaagccgtttcaaagttcccatgccgagcaatgaatcgacgattgcacttttgcccatgcttgtaggtgcactcagcaccacgttttgaccagacttgagcagatcgaatatgtggaactgcattgagtggaaaacataaccatccgagaatggcgtccggtatagctcaagcaccctcaggtcatccggtgtcaggctggtgaactcctttttgagatacgggaacaaacctgattttctcaccatatttttcaaaattgtggtgtgctcggaaaaccgctcgcgcgaatcgagagctcgcacgatcaagtcccgtcccaagtcatacgaaacagggttagacaacagcttgttaaccgcaaacagataattgaacgatgagaagtcctcaccctgcaggctatgtttcgcctgttcatagatctctgtcatacgacctctctcaccttctcatcaactaattgggttaaccgctcaagactcggggctggataaatgaatacgtggatgcaaagattcgcaaacggcgaatcctcgatgaggtcagccgcgaatttttcgaacagcaccgctgtttctttctccaggtcatcctcgaaccccggcgtttcaggctcggttagtagattagagtcgtagcccacgaacagaacaaacgtgaaacgatcgaggtgagcatcgaaaggttggctgccatcaagaatttcgtcaatgtcgtggcgaagcaggtagttatcgtctttaatgtcgaggatttttttgcgcgcggtatcgatgcaatccgaaatgtcctcgtacaactgatcccgtatctccggcaatctgacggcaatgttaatatcagtcaccaactcgctgaagccaatccaaagctgatcaccttctggatcgcggcgaacgatatgcacgttttcaagaattttttcggcccctgctttttccacgtatagcatgcaaggaataggctggctttcgtggtgctgccggatcgttgcgtgcaacagcactcgacccaaaaattcgctgacgtcatggagcgatttgaagacggaattctttagtcgttctcgcttttcaatgaatgtcagtttatgaatatcagacatttcttttggtcggagaaaaacctcatccaaccattgacagacgttatccgcgatgtgcttgtagcggtatttcttaagtgagtactgctgatgtagaacctggcctttacgcttagcgcagaccgaagccataggcgctctaaatggcgtaaggatgtggggtaagtcccgtttgacgtagattttgcggcctgaccgagattggtcatcttcgacacgctgcttgaaccactcaagtaggtctggtcgtaagtaggacttgtcatcagcactgtgaatgcgtcgagaatgctcgcccttgcgcgtcacagtatcaaggatgcggcaccaaatgtcttcggcgacggtttcggaactgagaatgaccccatgtagatcttgggaggccagccgtatgttcttgatccctagaagttccagttcgcgcagggatgaaaacacttcccatgtagccgcatcgatccaatctgaaacgcttatacctgagtctgttaaaaaattgtctgtgcgtttgttgaggtcatcgatgagttcctgtcgacctggcttatctagtcgggcgtttgggctgatcgtcaagtactcaagggttttgttgaccttttcctctgtgacgatggagtacctacgtccaagggacaggtcagactcacactgcattgatttgtgcaaaattgaactgcaggggatcgtctttttatcagcaccttttgaattctgaacgatgtccgaaatgttccaacgtgttttgccggtgctttttacctgaacgaagtcgatgtatccatcagatacaatgtcgatatcgtctgtgacctcgcagcgcacactgcggatagtcttgtcacgaagcattcgggtgacatggtaagcggctacgcagtcctgaaataagaaaccgtgcttggcggctactccgcctgaatcgttcgactccatttagacatccgtgacaattttgcgaaaattaaggagatgttatgacacagtccaatcggatcactgcatcatcaccagtgatctaaatacttcacagccattctcggtcgcaggtatcaagcttttcaggattccacaaatattgtaaccctgacgtctaatttggttatataacatactgccccaactaacgtaaggtaggcacagccttaatcaaggttttggttttcaaatagttcagagctgagaccgccaaccgcactatggcactatggcactatggcactatggcactatggcactatggcaccgccagcgattgtaatcacacttgatattataaaacacagttgcacgcattatttcctggttggtagggtcatatctcgatgctctttgagcaatgtcaacatcgcgtgttcatggctttctatattgttgatgccttgcccatccggaccccactccttatagctcatcatgatggcttgttttgggctctctgctcgttctgtttcgacgtagaattttttcttgtctgctggcgaataattactaagtatcgagttgctgcttggtgagatcaggaagaggttaccgaaacgatggacatcatcccccattttgtggactgcccccccggtagacgatcctgccctatagttggagtgccccctattcaggtggctaaatttagcaaatcaatacacttcaggggggtattattgtagagtttccccatatgtttctatgggatccaggaaatgacaatcaggagttacaaaaacttaaatctggtcagggcaaatatcgagactgaatccagacaattcattgaaaataaaaactattcaatccaatcaattggtcctatgccagggtcaagggctgggcttcgggtcgtatttaccagaccaggggttaacttggcaactgtggacattttttataacggggacggttcgactacaattcaatatctcactggagccaatcgttctctgggccaagagttagcggatcatctttttgaaaccatcaatcctgctgaatttgagcaggtaaatatggtactgcaaggatttgtagagacaagcgttctacctgtacttgagctatcagcagatgaatcgcatatagagttcagagaacactctcgtaacgctcataccgtagtgtggaaaattatttccaccagctatcaggacgaattgactgtgagcctgcatatcacaacaggtaagctccagattcagggccgaccgctgtcatgttacagagttttcacgtttaacttggcagccctgcttgatttacagggtttggagaaagtgctaatccgccaggaggatggtaaagctaatattgttcaacaggaggttgcccgcacttacttgcagactgtaatggccgatgcttacccgcatctccacgtgactgccgaaaaattgctcgtttcagggctatgtgttaaactcgccgcccctgatttgcctgactactgtatgttactttatcctgaactacgcaccattgaaggtgtcttaaaaagtaagatgagtgggttaggcatgccagtacagcagccggcaggttttggaacttactttgataaacctgctgctcattacattctgaaaccgcaatttgcagctactcttagaccggaacagattaacatcatcagcacagcctatactttttttaatgtggaacgtcattctctgttccacatggaaactgtggtcgatgccagccgtatgatttctgatatggcccggttgatgggtaaagccactagagcgtggggaataatcaaggacttatatattgtttgaaatcaccggaattaacgtctcaggggctctaaaagctgtcgttatggcgaccggcttcgagaaccctttgtcctcagttaatgaaattgagacgaaactttctgccctactgggtagtgagaccactggtgaaatcctttttgacctcttgtgcgctaacggtccagagtggaaccgcttcgttacgctggaaatgaaatatggccggatcatgctggatacggccaaaattattgatgagcaggacgttccgacacatatcctgagcaaactgacttttactttacgtaatcatcctgagtacctagaagcctctgttttgtctcccgatgatgtacgccaagtcctgtcaatggatttttgaaactcttctttctaaacgaaccagtatagaattcgcccttttggcatgatattaacttgtccaatatgatcaaatagcattaaccccccctcacaacgtcctgcatagggaacacgttttcccctgtgcacccacgactaaatttccccccctttaaacttctcaataatgtcaccaattttctggaaatcctatgatgcctttcccggtaaatggtgctgtgagttcagaaagattctgcaatctatgtgcattgaaaaaatcttcagatagatatcattctcctgaacaatccgatgaacggcagaacctcgcggttctgccgtttttgttttacttttcagaggagtggtgatgaaaaattttgaagttctgcagccactacagaactccctttccggtctaccgctatgggtatctgaacgtatattgcagcagataaatcagttaacccactacgagccagtgatcggcatcatgggtaaaactggggcgggaaagagtagcctttgcaatgccctgtttgccggtgaagtatcgccggtcagcgatgtagcggcctgtacacgtgatcctttacgctttcgcctgcagattggagaacactttatgaccatcgtggatctgcccggcgtgggcgaaagtggcgttcgcgataccgagtatgctgcgctgtaccgcgaacaacttccccggctcgacctgattctgtggctgattaaggctgatgatcgggcactggcgactgatgagcatttttaccgtcaggtgattggcgaagcataccggcataagatgctgtttgttatcagccagtcagacaaagctgaacccaccagcggtggaaatatcctttccacagagcagaaacaaaatatcagccgcaaaatctgcctgctgcatgagctattccagcccgtgcatccggtgtgtgccgtgtcggttcgcctgcagtggggactaagggtgatggcagagcggatgattaagtgtctgccgcgtgaggccagcagcccggtagtagcgctactgcaacatccctttcgaacaacggtagcccgggagcaggcacgtgacgatttcggtgaaaccgtaggtgccatactcgatacggtaagcacctttccccttattcccgccccggtgcggaccattattcaggccgtgcgttcctcggtggtgtcagtggcccgcgctgtctgggatttcttcttctgagtgtttaattctgccctattattctccgagccctgtcgcaagtgcggcagggctttctttatttgttttacccatactgaggagtctgcttatgacccgtctggcttcgcgctttggcgctgcaaatcttattcgccgtgaccgtccgttaacccgtgaagagttatttcgcgtggtgcccagcgtattcagtgaggataaacacgaatcccgcagtgaacgctacacgtatatacccacaatttccctgctggacagcctgcagcgggaaggcttccagccattctttgcctgtcagacacgggtacgtgacccccgtcgtcgtgagcatactaagcatatgctgcgcctacgtcgggaggggcaaattaccggtaaacaggttccggaaattatcctgcttaactctcacgatggcaccagttcgtaccagatgctgccgggcatgttcagggcggtgtgccagaacggtctggtctgcggcgagtcgtttggcgaggtgcgggtgccacacaagggggatgtggtgagtcaggttattgagggggcgtatgaagtgctggggatttttgagcgtgtggaagaaaagagggatgccatgcagtcgttgcttttaccgccacctgtgcagcaggcactggcaaaagcagcgcttacgtatcgctttggtgaggaccaccagccggttactgaatcgcagatactctccccacgccgctggcaggatgagagcaatgacctttggaccacctatcagcggattcaagaaaacctgattaagggcggactcagtgggcgtaatgctaaaggcggacgaactcatactcgtgccgtgcgtggcattgacggggatgtgaagcttaaccgtgcgctgtgggtgatggcagaaacactgctcacgcaactgcagtagacgtttcatgttgccacgttgttaatatcggacaccacctgtccgcatcgctatgtgctcgtgtgcctcaatcccccggttatagcttttaacccccgttacatctggcttttgcagaaataaaaaatagtttctgcgttgtccataccctgtccgcccccctctttaaagtaatcacatcattttcagtcagttaactttcctggagaatctctcatgacacaggcagaacgccgccatgaccggctggctgtcaggctgtcactgataatcagccgtctggttgcgggtgaaacgttgagcgtgcgcaaactggcggctgagtttggcgtgtcagtgcgcacgctgcggcgtgattttcgtgaacgactgatgtatctggacctggagtatcagtccggatactgccgcttacgcactgctggcagtgagatgcagatggtgcccgacgtgcttatctttgcccaccgcagcgggctggccgggctttttcccggccttgaccgccgtctggtgaatgcactgctgatgtgcgatgagtctccctgcgtgatagcaccagccaatccggttccttcgccttcaggagcattgtctttctggagactgattcaggccattaccgggcgcaggcgggtgacgctgattgcagaggggcgacgctgtgagcgcctagctccctgccggttactcatccaccagcagacctggtatctggtggctgaacacgaagggcatatcgccgtattcacacttgatgaaatccatctgattcagcctttgcaggagacttttcgccgcaatgacagtctgtgtcgcctggttgaagacccggtcttcattcaggccttaccccattttcgctttatccagcattcactgcttacgtttgttccggccgacagcccaccggaatagcgcaggcgttgttatcaacccggcaacatggaggagcccagtgcccgttattgccattatcgccattgttatcatcgtcatcattctgaacaaaaccggagtgtccgacagcctcacggccctgacacttgcaaccgttgccgcactactgacgggaggtggtgcagccggtgctgccagtgtcgcgctgacgccgttcgtcggcgtgccggtgggtatttttgtgggaatttatgtctttgccaaagtggttcgtctgatttcagggaaaaaataatgaaacgtaaaacactacctctgctggcgctggttgccacctctctgtttctgagcgcctgcgatgacaggagtgatgacctcaaagctatcagtaaatttaaggacctcacgcccccgcgcttcagcgatgtggtcagccgtcaggatgatgtcagcgaagaatggtcacaggttggcttctcatccggtctcaccctgcaggtcttacgtacccgtgagtcgcccgatggttgcgagggtggcagttactactatctggtagatatggaggagaaaaccgtccagccgctgatgaatgcgctttgtattgccgacaatatcaaactggaataccacgaagttacggacccgtatacgaaagaaaaatacttcgaatattcccatgacggcaaactgatgggacggctgctgataccgtcaaaccctgataaccgggaataaaaacaacgagaaaggagacataaatgaaaatacgttcactaagccggtttgtactggcaagtacaatgttcgccagctttacagcctctgcggtccccggactctggcaacaggggtacggtcagggcaatgcggaatacagtgtgacggatgccagcggaaagatgtttaccatcaactgcacgggaaatccggaccagaacggtatttaccagcactcggtttttctgatcctcgccggggataaaacggtcagctcgcatgatgacagtaccggcatcacagtggtgatggaccataagcaatatgccattccctcaacccttggctggcgtaacggagataatgcctggttcagcttcatcatggatatccgtaaggcccggcagttcgacgtctacgtcaatgaccagaaagttggatcgtttaaccctgatgttcggaatgcacaaaaggtcctgccaacattagcggactgcactaacgactgacggctgcgccttccctaccataacaaccctgattgcctccggcggtcgggggtttcttttttctccttaatctccagaggtaggccacgtactttcgaacgatgagcgcagtggtcagtttttttcagatatatttatctttttttggctgtaagctccgctgtgagcgcaggctgtgttaaaactcctgatcactttttggtctaagcgatggtttcatatgatcaaccattcttgataaacccatgagacggactaactttttcattaaaattaaaaagatatgaatgaatactgcggatatcaacatggccaatcacattcaaggacaaggcaggcatcaggtgacattgctccctgatgcactcgatgattttgtcactgaagatatctgaaataagtttaatcagttcatcacgggtcggtggcatatcgagataattaattattgtcggttcgttgccgttgttatgaagcatctccagcgtgttgcgtgaggtgccacaggccgggttgtgatagatggtaatgttgctcatatcagtatctaattacaaagtgacagagagccgccacgccagcgcggccagagtgacaaacagcaccggcacagtcatgacaatgccggtacggaagtaatatccccaagtgattgtcatatttttctgggcaagcacatgcagccacagcagagttgccagactgccaatcggggtgattttcgggcctaaatcacagccaatcacattggcataaatcattgcctctttgacgacgccagtcgccgtactcccgtcaatcgacagcgcaccaatcagcaccgtcggcatattgttcatcactgatgagagaaatgccgtcaagaagccggtgccgaacgtcgctgcccataaccccttgtctgccagcagattcagcacgccagacaggtactccgtgaaccctgcattgcgcaggccatagaccacgatgtacatgcccagtgagaaaataacgatctgccatggcgcaccgcgcaggacttttccggtgttgatcgaatgacctcttttcgccaccacaaacagcactgctgcgccagcggccgctatcgcactgaccaggattccctgcggctccagaaagaagaaaccgacaagcagcaataacaggacaatccagcccgccctgaaggttgccagatccttgatcgcactggcaggcgtcttcagcagcgaaacttaatacgttgccggaataactctgcgaaagaagagatacagcataatcagcgtggccgcaatcgctgccgcatccacggagatcataacggaggcgtactgcgcaaagctcagaccgaagaagtccgccgagacgatattcaccaggttagaaacaatgagcggcaggctggccgtatctgcaataaatcctgcagccatgacaaaggccagtgtcgtgccctggctgaacccagtgcgatcagcatcgcaatcacaatcggcgtcaggatcagcgcggcgccgtcattggcaaacaacgcatcaacagcggcaccgagcaagactttccaggtgaacagcgctctaggtaggaactttgtcgttgatagagtcttcagccatcaacactgtatcgagtaatgaaattggttgctagaaagtcgatgatttgttgcgtatgattaaaaatcaaccttaaaggctttatacatggatttgctatggcttttgtatcagaaagagaaattgtaagaaagatatttagcaaaaaaattgactttacgatcttggcatttttctatatttcctctattttttttcttctttgtagtggcgttctctttcaatattttaccgctgccttcacaaaaggtaattgttatgaatgctcaatgaaacttgattacataaaacaattttatttttcactggaaaccgcatggtacctcatatctgctgttgcagtatttattgcatctgtttttatacagcatagaattaaagcttatttaacattattagctattacatggattgtactaacaataacagatgtggcgttaatacacgccttagacaatatagccatgaataatattttgttaaatatactatataatctttttggggcgattttattgtcactgtttatgtgtttatcaaattccctccttttccaccttaataagataaaacatattccaatgattttatcggcaatgattccattagtttccgcaataataatagccatactcataaccgctgttatatatttattgtttgcccggcaggcggtagagattgagatggatatatctgaaggttcagacatcgcatatgtaggtgtaaaagataatgaggaatcatttgggtttttaaatgataaaaaaacagacacaccaacgtatctggatgtaatcaaaaatggtagtttgatatataatgatacacagggtttaagtggtgctgatatttatattgtctccggttgttatgcccttccagatttacttcgcaatgtaccgcttgatgctaaaaaatcttttctgaatgtaaaaaagctagaaatcacacagaaacttccaatgatggggttcatacaaggtgaatccgctgatgtgatgcctaaagcagcatccaggttaagtttgagcaagcaagatgataaatttatgctagcctcaagtgttactgactctcaaataaaatttaaatcaaacaatgcacaattgatggttgctttcgcatttatgccaataacaacgaatggtattttacatgattatacatacgatataataataaatgataaaaaatataaaattgaaaatcatgttgcacctctatctaggcttgataaaaataagaagatgaagtgtgaataccagcaaatatcggatttaacaaatacgtataacattaatgcaaattacttaacgggttttttacttgtcctaaaaccagatgatattattaattacaacaatagcccttccgtactactcaagactgattttgcgttctataaaaaaacataccagaagcttgataaaatatatgatgacataagcaatggaaaattatcttcactgagagcaacaggtatctcccagtttagtatcaacgggaaacatttgtcgttaaggccagaatcggagattattatttctgaagggagtttgtatggactagttaataaaagcaaaaaaatcaaaatatatggcacagcagatcttgtttttgttgataacaagataatgaaccttcgtaaaataacttatttgcaatctaagctagaaatttttggttcttctattatggatatattaaagtatatatttggtttaggtctgctagcaatttctataaaattcattcattcttactttaagaatgatgtgaatgaaaatttattcttgtaacgcatttggctccaattggagcctttttatgactatttattaaaatatcctaagttaagcctgtttttaaagcaggcttgagcgtgaagcggacactcatacctgctttaaagtggcgtttttgtcgttacccatacctatattttctgttgtttaactgccagaactgagcggttgaaaagccagaaatatgccgagccagcggcatggaagcgccagcagctgttgaatggagtactgtaggcaaatggtgccgtaaccggctttcgtactgaaaggttctgtctatcccatcccttctcttgtatctaacatttagttgtgaatagctactgtaaatgcccctacaaaatgaaccattatttttagagggcgtctggcactccaacttccgcttttggcacagaacggcctatcagcaatataaaagcattcagatatatatcatttctacaaacatacccgattaacggcagaatctcaggattctgccgcttttttattatttttcaggggagtagtaatgagcaactctgaaggttggtagtcattttagcaaacgctttctggtctgccgcagtgggcatcggctgattgcgtagcagggccactggtatctgccggtatcaccgacattaacattgaagacgaccagggcattcacgtccgcctgatagttcgtgatgccgaaggtcggatggttggcgggcatggaactttgaaccggacgccggtgaaggttttaaccgctatatccacaggtcaggcatccgcaccgacaccttcccccgctgactccgaatcatttaccagcaacatttcaccttcccaaacgcgctttattacctcatacgccagccatcgccgctggcgttttttattcacggagacatacccatgacaacacagacacagtacgacctcgtacccgctaacggatccgaatttgagttgagcgtaacgcaggtacccgatgaacagcatatccgcttctggccgcagcactttggcaccatcccgcagtggataacgctggaaccgcgcattttcgcctggatggaccgcttctgtgatgagtactgcgggggtatctggtccttttacacgctcagcaatggcggagcgtttatggctcctgatgctgacggtgacgataaatggcatttgctcaacggcatgaatggcaatggtgcggaaatgagcgcggaagccgcaggtatcgctgtctgcctgattgaatatagccatcacgcctgcctcaccgaatgcgatgccatgacggagcactattaccgcctgcgggattacgctctgcagcaccctgaatccagcgccattatgcgcattattgattaaggatactcatgatggaacagtcactcatcccacagacaccggtacttccactgaccgcacaacgcacggtaaaacgcgccttaacgctgcttgaccgacacctgcgcgaaacaggcgtggcattcacctccactcaggctgctcgtgactggctgaagctgaaaatggcggggctggagcgtgaagaatttatgatgctgtatctgaaccagcagaaccagttgattgcccacgaaaccctgtttgccggttctattagcagtaccgaggtacatccccgtgaggtggtcaaacgcgccctgtatttcaatgcagcagcagtgatactggcgcataaccacccctccggcgacactactcccagccaggcagataagactataacgcagcgtctggtgcaggcgcttcagctcgttgatatccgtgtccctgaccatctgattgttggtggcaggcaaatctattcgttcgcagaacacggtctgctttgaggtattacatgagaattatcagtaaacgccgggcaatgacgatataccgccagcatcctgagtcccgaatctttcgctactgcaccggaaaatatcagtggcacggtagcgtctgtcattacaccggcagggatgttccggatatcacaggagtcctggctgtgtacgccgaacgccgcaggaccgcagcggaccgtatgcttgactgatgagtatcaccctgaactgacaataaagaggttatgaatgagcaacaccacatggggcctgcagcgagatatcacgccgcgcctgggagcacgtctggtgcaggagggcaaccagctgcactatctggctgaccgggccagtatcaccggtaagtttagtgacgccgaatgtcctaagctggatgtggtatttccacattttatcagccagatagagtcgatgctgaccactggtgaactgaatccccgccatgcccaatgcgtcaccctgtaccacaacggttttacctgcgaagccgatactcttggtagttgcggctacgtatacatcgctgtttaccccactcaacgctaactaatttcacgagagcaagcatgaacactctacctgctacaatttcgcaggcggcgaagccctgcctgtcgccagtggctgtctggcaaatgctactgacacgcctgctggaacaacactatggcctgacactgaacgacacgccgttcagtgatgaaactgttattaaggaacatatcgatgctggtatcactctggccgatgcagtcaattttctggtggaaaagtacgaactggtacgtatcgatcacagaggattttcgtggcaacaacagtctccatatatttccgtagtagatattctgcgagcaaggcgctctaccggcttgctaaaaactaatgtgaaataaacgcttaaatacagagcagactgaaggaaagcaaaatgctaatctcatagacgaagagactcccgctgtaacctcccctcccccgaaaaaacctgacattttcttttaggaccaacaatgggaccaaaatgaaaattgaactgaagattacaatcaatttaacaacaagttacacaaccaattcagactccgccagcccaccaatcatgattggacggtgtaaggacaacaccaacaaaaacaggaagttagaagtctcagcaaaacaccgaccagacggtgaggagacataaaaggatacgcaaaggagccgcggctcctggtaacatgaaagcccacagatgtgggctttttcgttgatggtcagaacgaccagttcacaccagctaccgcgttccacggggattccacaccggcactatggctataccccaccccaagatgcccgcttaacgtactgctgaatgaggctttaatacctgcctggtatattccacgtctgcccgacaaataattgacgaaattaccgtcactattcactttcacccggttatcatcgacaaattctttgcgcacagccgccttcagccacggctcaacttccataccgttccccagacgcatgttgtaactcagcgttgcgcccagttcacgatatatactgcgggtatcgactgatttcgatttcatgccattggataaatgatattcggggttatcagcggtgaaccccgttaacgatgcatacggcgtcaggttccagttaccatcggtaaatcgcatcccggtttcaatgtgaccgcccagcccgttgctgtggtaactgccattggcggctccaccgctgctcattttacctgctacgttacttttaaaacggttcagcttcacgacaccgtccagatagaaaccactttcatgttcccaactggcatagccgcccagagaataactgcccacactgccatgtcctccgcgatcaaaaccgatatgtgaatgggaatagcccataaaagcgcctagcgtggtaattccttcaggaatatcattacggctgtcgatccccactgtcattccggtcagcgtctgctcaaacccggcacccgcatcggtggtgacattattacgggtgttatacgtcgccccccagacattattgttgtgtggactcgctttcattatgttcaaccgctcgcgaatactgtttagctcagcatcaaataccaacggtaatgttgctgccatattgagtacggctgccgtagaaggcgtaatgcgtttctccggaacgggtgtcggcgttggatcgggagtagggtctggttttggatttgggtctggctttggatcgggttttgggtctggctttggatttgggatggggtccgggttgggtttgacatcattggtcaggttccagttgctgttgccgtcacttttcaggacatactcataggtcccaagatcaacgaaaccgccggtattgcccagcgtaaacgaagcatcccctccccctgttttcaccagcgtcatcgcgtcgtcagactgtgggctgacgccggtatcctgaacaaagattttaaaattaccagtggcgttgttgttgacgaccagttgatcgccccgggagcctgcaacgttggtatgcaggtagaaattaccgctaccggaaagttcattggttgtcagcgtattgtagataccgttagttgtggcaggcgctgctgtttgtgctgacaaataaacatcaccgtcgttgagtagcaaactgtttactctatattcgcagttgctggtacctgcacaggaattattgctgttaagccagacactgccccggctggcagccgtcaggtcggcaagcgtggtatcgacgccatttcccagagtcaatgtcgcgctatcggtaatccggaccgccccttcgagtttaactggcgtaacattatcccgtggcgtcattaacgacaggcttcctgtcgcgccactgaccgatgcatccgccagcgtacctgcgtagacgattgccgtaccgccagcgacctggagatcttctgcccgggccagagcctgaaactcatcttttgaccgcccaagggtatattgcccgccagagttaacctttgtggcggagtcctgacccaggttttgcattgccccacccttgccaaccgtggagtcgcgagcttcggtacctgctaataccaataaattaccgccattttccagcaacatattggtcgctaaattgccggaaatggaaaaagtaccgtactgatgagtaccgctgatttcaataccgttagccgtgctcgtctggagagcggcaccgctgttctggacgatatctgtcgctttgccattatcgttgactgtcagcgtaccgccttcattgatctttgtttttattgcctctccgttagctgaaactgtttgtattccgccgtcgttaattgttgtctcattcgccacaccctcgacaatttgttcaccgccggtgagcgtcgtgcctgtcgcagtggcttttgttttgacgatctcccgtccgcccatattgacctgtgttttgtcagaagaggtgtctgactccacggttaacacgccgccatttgccagcaggatattgttcgccgcaccctgctcgatgctgaacgcgacgccatccgcgcgtgttcctgtgacccgcgtcgccctggtggttgcaaccaaagcgccctggctactctgctgtatccccgttgcgctgcctttctcccgcacatcgagtgtgccgccgtcattaagcaccgagttttcagccaggccgccctcattaactacctgtgaacccccattaataatggaaccttccgctgtcccgtttgccataatttgttgtaggccagagacgatatcggtattgattgccttaccataattctgaacggtttgcgtgccaccattgatgtgtgttttctctgttgacccaccatcaacaatttgttcaccactttcgatatttgcttcagtggctaaaccatataccgtttgcttgccacctttgatatttgctttatcagaagtggcactggcatatattgtttgggtgccagcactattgagtacagtgccaacatcttttccataaacatccattttgccgttggcattaataatcgtgtcaactgcgcgggaaccagtgacgactgttaatgagccagcgttttccagcactacatttttagcttctgaattcctgatgtagaaagcatcaccataactgttggttccttcgataagtgttccggaggtcgtggaagcaattaatgcgccgccggattgttgctcaacatgcttagcctcaccaccgtcctgaacctccagaacgccgccattattaagtctggtgctatctgttttagcctccttctggacaatcagcttaccgccagtatcaatggtagtatttttcgccgaggttttagccactaccgtcagttcgccggtattttccagcacaacataattagcctcccctccggtaatagtgaagtgagagagcttgttgtatccttcgatatcagtccctgcacccgtgttggcaactaaagcactgcccgtctcctggttaaccccatgtgcaataccgccggtatagacaatcagcgagcctccggcgctaatattgctgccaattgccgtaccatctttctcaacaacctgccggctcccggaggatataattgttgtgtcagctttcccgccgcttttgatattttgcgttccgctgttgatattggtgcctgtggctatgccataattattaatattctgtgtgccaccattaattatggtatttgtcgcgtttcctgcaacatccataaccccgccattatctattcgggtcgcatcagctttagcattggttaaaactgacattgttcctttatctttaataatcgtcttgtttgccgaaccatatgcgtttatgtctaaatgaccaccgttttccagcaacacattgtctgccacgtgattgtggatggagaatgcaccttcactattcgtaccgctcaccgtcgtaccgttagtgttagtttttaaaattgcaccatcgtgctgggtaacatttgttgccgtaccacccctaacatcaagcacgccaccagaataaacttcaataacatccgaggtgctggtgttatcaacaatttgcgtgccaccagaatagatatgcgtattttttgccgttgacttactattcagagactgagttccgccttcaatcgtcgtgtccagcgcacggctctcatatactctttgctcaccgccatttttaatggttgttgtttctactgtgctctgttcaacatactgtcgaccaccatttatggttgtgttcgttgccagacttccttgtactacgtcctgagagccagacttatttatcgttgtaccatcagcatgcccttgaacttttactatctggctaccaccatcaatgagtattccattcgcactccctccctctacgcgtgaagcaccgcccttaattgtcgttccattgctgataccccctttataaacgtcctgattgccactctcgattgtcgtacctgtggaaatacccccgtcatgaattgactgtctgccaccgttaatggttgtattattagcctgccccacaaaattgttatgacttcctatatcttgatatccaccagattcaataagacttccattagataccccgccatgaacattctgctggccatggttgataatatgagtgttatttgttgtacctcgttcatccactttttggttgccatctacagtctcatcgtttaccacaccaataacattagtagtgaaggcagccatcccgggcggggcatatatcaaggcagatatcaataaggaaagtactgagcggcgacaataatagggactggtcctgttcataaatttcatcctctgaaaagtgaatactgagtagcgtttaagcgaccttagctttgctgcaacatcagcccacaggcaccagaccaggggattcatcctgaagagacagcgcaagtgtattgtgttcaccgctcatcaaagacatcatgatgaaatgatgatattccgcataagaatgaggcattttttaaacgcagtgcgctgaagtgtggttggataaaaaagtcaatccattcaggaaatacgggcgtattcttttctttcgacaatgaggccgttggcaaaataaaatgatttacataatcgtttctgatgaatatcttctgctcacataaaaatcacacaataactttgagatcgcagattgttttacttttacagcattcgtccccccattgttgggcaaatatagattgggccagagcacgaaagttaataccacgttcgcacagctcctccaacagcacgacaagatgccacatactgcgccccagtcggttcagtttacagactagcagtgcgttccctgccgatgatgtcctgaccagttttttcagtccggacctcctgccacggttttacgttgaagtggtaaccctgagcacgcagttcttcagtcaggcgtggtgcaccgtaacgctgttattgctgggtaagatcaaaaaactttcaggcagctaaggaaagttgaaccagacattagatgaaatatttcaaccaattacagcaccaattcagtcactgccagcccaccaaataaatcaaggggttacatgaaaacgtagcccctttttctttggtagtgacactaaaatggatgtagtgtgaagaataatcccgtttactcaatcaataatacatattgtttcaatctacgttattatctctttgtaaaaattgccatttattaatcattgaaaactgcttttagaacttgatacaacgggactagtcacaacaggactattctcaacgggatcatcctcagaggaactatcatcaaagtcatcatccataaataaaatatcatcgaatggtgccacgcccgtgatgagttttattttattattacgatcagtcaatactccacttaaaccgttttcgctcacaggttttaatgatttttcattactcttgttgtaagcaggcgcattaaaaatacacggagtatcaacatcaaacaatgacgttccccagttcacatattgaatatcatagttactgaagttctgtccagaaaagaagcaccccttaaaatccaatccacgtaaattatataaaccaccctcttctttttggagagtaatgttaattttggctatctcccggacatcatcgccatttttgtatttgaataccgtttcaagatgttctccagacagcttgacttcaggaaataatttgaaatcaaagcctatattattatgtgtcaacgtagatgaacaaaaaatggaaaaagcttgcagtgctgaattatagctatcgattttatcttgaggctgagctcttggtaaaaacttatagcaacactcataaaaattaaacagaagctctgaagaccttgtatttttatcaaataatacccccttgaactcattcacaaacgcatcttttttttcttgaatatctatggggtgttcctttgactctgacaaagatgaaatctcatctattttgttttcatatgaattacgtgattccatacagacatttggcggcgtttctaaaataacactacgcgtactacttggcttaagtaaaccaacatgaaaatcactttttcttatattatcgaaaaggttctattcatttcttttagcgcattcaaaaaactgatcggcattatttttattcgataattttttagtttcagaaaacacattttcattgttttccagctttagtttaatgagaagattttcccagacctgcttgcttaaacatattacgtcaggctcaccagaactaactaactcgtgattattattaaagtgtacgttgaatacctttaagttattttcaccaacttcatatttaatacgttttaattgttctccagctcccataatgacaaaggcgttgccttcttgatatatacattcagacatcattttttgtaaagtttcaagagcaccgcgatacgtctctgatgcagcttccttacaaattaattttaaaatactatgagctagtagctccatgtgtttagaagatttattttcattataacttccactacccaaaactgcgctagcgttaaatccgttgcttttactaactaacattgtctattcctcaattaatgtctacatggctatttttaatgttattactgtttgtcactataaaaaaacgctcatttgagacaattactgacattaactgcttcacttgctacgcatggaacttttaattaaattagcacaggaatgttaaatttaataaacaaaaggttatttcgctgtatgataaaaaaaaccgttataatttattagtgaaaatcgtttttcaagtgttagaaatttatatctcaatagcgttggttaatgagcatagccacgctcctgtaacgctcacaaaactcatctgcctgcggcgggtgttctggtcagtagtagatgtttaaggcgtggcagagacatttcatccttactctacggcattgttctacatacattggttgtggtactcacttatcatcagtgagcgaacagagaatagttcagtgatttgagtaattaacctgattaaatgaaggggtataataaatgataatactctggctttatcgttaattacttaattccacatgtaagcaatttgcccgcttggcatagcaggcattttttccaggtacttttgaatgagtactgatggataaatacattgcagtggcgtgccacgtaccaaaacaccagccctcattcgaaaccacccaccgcacttcttccttgaaatggcgttagtcatgaaatatagaccgccatcgagtaccccttgtacccttaactcttcctgatacgtaaataatgatttggtggcccttgctggacttgaaccagcgaccaagcgattatgagtcgcctgctctaaccactgagctaaagggccttgagtgtgcaataacaatacttataaaccacgcaataaacatgatgatcatatgatgtaaataacagatttttatgcgttcccattcaccttgggtcgtgattacacgcgacataaaacccgacaccgcctccattcgcaaagtcgatactcgcagtcaacaagcaaatgttaataattagcactatctatagttatcatcgattcaatgatactttgtaatgattttgtatctaataatataactttattacattagctgaagagttttcgcatcattatgatatctgttacttttcactccataaaaataaacttcgtatagcaatatattctttcatagatcttattctgctaatcattagtttcgtatgagcgatttttgacagttgcctctccagaccacatcgataattaataaaacagatttaagcattatccttttccatataaatattggataaaagtaggacatctgtttgcaattactttcacaacaattaaacatttttatgtttccgtatacatcatattactctaccattagaggaactttattatgttttctataaaaccaggacccagaaatttacctatcgacaaccccacattgttatcatggaacattactgacggggatctaaattccaaattaaatacattagaatatctaaactgtataacaaatattattaattcttgtggagtttaccctcaaggattaaaagacagagaaattatatcaacttttcacgcagaaaaagttattaatgatctgttaaaaaacgattataaaatttccctttctccagatacaacttaccgagagttgaataaagcagcacagcgtagcattacagcgccagacaggataggagaaagaaaaacataggtttatcaacgagatacaatgattgaaagaggtgataacagcggtgtttatcagtatggtcgtgctgaacatttcacccacattatatctgacaaaccttccccaaaagataaatatgttgcatatgctattaacattcctgactatgagctggcagccgatgtatataatattaacgtgacgtcaccttccggacagcaagaaacatttaaaatattaatcaatctagaacatctacggcaaacacttgaacgtaaatctcttactgctgttcagaaatcacaatgtgaaatcatcacccccaaaaaacctggcgaagcgattcttcatgcttttaatgccacctaccagcagatcagagaaaatatgtctgaatttgcacgttgccattatgggtatatacaaatccctccagtgacaactttccgcgccgacggaccagaaactcccgaagaagaaaagggttactggtttcatgcttatcaacccgaagatctttgtaccatccataatccaatgggagatttgcaggattttattgcattggttaaagatgctaaaaaatttggtatcgatatcattcctgattatacctttaactttatgggaattgggggtagtggtaaaaatgacctggattatccctctgctgatatacgagcgaagatcagtaaagatatagaaggtggtatccctggctattagcaaggtcaggttttgattccattcattaaagatccagtaacaaaagaacgtaaacaaatccatccagaagatatacatctcactgcaaaagacttcgaagcaagtaaagataacatctctaaggatgaatgggaaaacctccatgcattaaaagaaaagcgtttaaatggaatgcctaaaacaacacccaaaagtgaccaggttattatgttgcaaaatcaatacgttcgtgaaatgcgaaaatatggcgtacgaggtttacgttatgatgcggcaaaacactcaaaacatgaacaaatagaaagatcaataaccccaccgcttaaaaattataatgagcggttacacaatactaacttatttaacccaaaatatcataaaaaagccgttatgaattacatggaatatctggtaacttgtcagttggatgaacaacaaatgtcatcactgctttatgaaagagatgatttaagcgccattgatttttcattgctcatgaaaacgataaaagccttttcatttggtggagatcttcaaacccttgcatcaaaaccgggttccacaatctcaagtatcccatcagaaagacggatattgattaacattaaccacgattttcctaacaatggtaatcttttcaatgactttctatttaaccatcaacaagatgaacaattagcaatggcatatatagccgctctgccgttcagcaggcctttagtttactgggatggccaagtattaaaatcaacgactgaaattaaaaattatgatgggtccacgcgtgtcggcggtgaggcgtagcttaataaaggttgctctacctatcagcagctctacaatgaattccacgcattatatatagataaagcaggaatatggagcgcatttgagggtgtatctgcaactaaaaacgttctggcctttagtcgtggggattctgtgaacattaatcactctcctcatgatggactagttataataaataaaggaaacgaagaagttgaaggtacctggcctaacaaattgcaacctggaatatacaaaaacatggggagtaatagcgttaacattattattaataatacccgaaaaattatcccccctggtaaagtatttacgcttagaggcggaactctaaatatcaatattcctgggcgtagcgctcttcttttagggaaaacaggagaaccgccgaactatctctatttataatttaatgttatatctgccccgataaaacggggcagataatatgtttagtttactaacggtcattttgcagtgaagccatttactgttttttatcgaccagataatctgttctctaatgttaactccccctaacctgttgctttagttattcatttcctgtctcactttgccttaataccctacgttaaatgttactaatttgttgcttttgatcacaataagaaaacaatatgtcgcttttgtgcgcatttttcagaaatgtagatatttttagattatggctacgaaatgagcatcgccatgtcaccctacatctcataagaggatcgcttctgatgaatgcactgaccgccgtacaaaataacgctgtcgattcaggccaggactatagcggattcaccctcaccccgtcggcgcaatccccgcgtctgctggaactcaccttcaccgaacagacgaccaaacagtttcttgagcaggttgccgagtggcccgtgcaggcgctggagtacaaatcgtttctgcgttttcgggtagccaaaattcttgacgatctatgtgcgaaccagctgcaaccattgctgttgaagacgttgctaaaccgcgctgaaggtgcgttgttgatcaatgcggtgggtgtcgatgatgtgaagcaagcggatgagatggtgaagctggcgacggcggtggcgcatctgattggccgttccaatttcgatgcgatgagcggtcagtattacgcgcgttttgtagtgaaaaatgtcgataactcagacagctatctgcgccagccgcaccgcgtgatggagctacacaacgacggcacgtatgtcgaagagataaccgattacgtgctgatgatgaaaatcgacgagcaaaacatgcagggcggaaattcgctgctgctgcatctcgatgactgggaacatctcgacaactatttccgccacccgctggcgcgtcgcccgatgcgctttgccgcgccgccgagtaaaaacgtcagcaaagatgtttttcatccggtgttcgacgtcgatcaacagggtcgcccggtgatgcgctatatcgaccagttcgtccagccgaaagacttcgaagaaggcgtgtggttgagcgagctttccgacgccattgaaaccagcaaaggcattctttctgtgcccgttcccgttggcaaattcctgttgattaacaacctgttctggctgcacggtcgcgaccgctttactccgcacccggatctgcgccgtgaactgatgcgccagcgtggctatttcgcttacgcctctaaccactaccagacgcatcagtaagcgcaaaggaattgagcggatgtatgattttgtgattattggcggcggcatcatcggcatgtcgaccgccatgcaactgattgatgtctatccggacgcccgcattgcgttgctggaaaaagagtccgccccggcctgtcaccagacgggccacaacagcggcgtgatccatgccggggtctattacacgcccggcagcctgaaggcgcagttttgcctggcgggaaaccgcgccaccaaagccttttgcgatcaaaacggcattcgctacgacaactgcggcaagatgctggttgccacgtccgatctcgaaatggaacggatgcgcgccttatgggaacgcacagcggcgaacggtatcgagcgcgaatggcttaacgccgacgaactgcgcgagcgcgaaccgaatatcaccgggctcggcggcatttttgtgccgtccagcggcattgtcagctaccgcgacgtgacggcggcgatggcaaaaatcttccagtccagaggcggtgaaattatctataacgccgaagtcagcgggcttaatgagcataaaaacggcgtggtgatacgtacccgtcagggcggcgaatatgaagcatcaacgctgattagctgttccgggctgatggctgaccggctggtgaaaatgctcggactcgaaccgggctttatcatctgcccgttccgtggcgagtatttccgccttgcgccggagcataaccagattgttaaccacctgatttaccccattcccgacccggcaatgccgtttttgggcgttcatctcacccgcatgatcgacggcagcgtgaccgtcgggccaaacgcggtgctggctttcaaacgcgaaggctatcgcaagcgcgacttctcatttagcgacacgctggagattttgggctcgtcggggattcgccgggtgctgcaaaaccatctacgctcaggactgggcgagatgaaaaactcgctgtgcaaaagcggctatctgcggctggtgcaaaagtattgtccccggctttcgttaagcgatctccagccctggcccgccggtgtgcgggcgcaggcggtatcgccggacggcaagctgattgacgattttctgtttgtcaccaccccgcgcacgatccacacctgcaatgcgccctccccggcagcgacatcagcaattcctattggtgcgcatattgtcagcaaggtacaaacgctgttggcaagccagagtaaccccggacgcacgctgcgagcggcacgtagtgtggatgccttacacgccgcatttaatcaataacctttgaaaacaggatgtagcgatgaaacttaacgacagtaacttattccgccagcaggcgttgattaacggggaatggctggacgccaacaatggtgaagccatcgacgtcaccaatccggcgaacggcgacaagctgggtagcgtgccgaaaatgggcgcggatgaaacccgcgccgctatcgacgccgccaaccgcgccctgcccgcctggcgcgcgctcaccgccaaagaacgcgccaccattctgcgcaactggttcaatttgatgatggagcatcaggacgatttagcgcgcctgatgaccctcgaacagggtaaaccactggccgaagcgaaaggcgaaatcagctacgccgcctcctttattgagtggtttgccgaagaaggcaaacgcatttatggcgacaccattcctggtcatcaggccgataaacgcctgattgttatcaagcagccgattggcgtcaccgcggctatcacgccgtggaacttcccggcggcgatgattacccgcaaagccggtccggcgctggcagcaggctgcaccatggtgctgaagcccgccagtcagacgccgttctctgcgctggcgctggcggagctggcgatccgcgcgggcgttccggctggggtatttaacgtggtcaccggttcggcgggcgcggtcggtaacgaactgaccagtaacccgctggtgcgcaaactgtcgtttaccggttcgaccgaaattggccgccagttaatggaacagtgcgcgaaagacatcaagaaagtgtcgctggagctgggcggtaacgcgccgtttatcgtctttgacgatgccgacctcgacaaagccgtggaaggcgcgctggcctcgaaattccgcaacgccgggcaaacctgcgtctgcgccaaccgcctgtatgtgcaggacggcgtgtatgaccgttttgccgaaaaattgcagcaggcaatgagcaaactgcacatcggcgacgggctggataacggcgtcaccatcgggccgctgatcgatgaaaaagcggtagcaaaagtggaagagcatattgccgatgcgctggagaaaggcgcgcgcgtggtttgcggcggtaaagcgcacgaacgcggcggcaacttcttccagccgaccattctggtggacgttccggccaacgccaaagtgtcgaaagaagagacgttcggccccctcgccccgctgttccgctttaaagatgaagctgatgtgattgcgcaagccaatgacaccgagtttggccttgccgcctatttctacgcccgtgatttaagccgcgtcttccgcgtgggcgaagcgctggagtacggcatcgtcggcatcaataccggcattatttccaatgaagtggccccgttcggcggcatcaaagcctcgggtctgggtcgtgaaggttcgaagtatggcatcgaagattacttagaaatcaaatatatgtgcatcggtctttaactggagaatgcgaatgaacagcaataaagagttaatgcagcgccgcagtcaggcgattccccgtggcgttgggcaaattcacccgattttcgctgaccgcgcggaaaactgccgggtgtgggacgttgaaggccgtgagtatcttgatttcgcgggcgggattgcggtgctcaataccgggcacctgcatccgaaggtggtggccgcggtggaagcgcagttgaaaaaactgtcgcacacctgcttccaggtgctggcttacgagccgtatctggagctgtgcgagattatgaatcagaaggtgccgggcgatttcgccaagaaaacgctgctggttacgaccggttccgaagcggtggaaaacgcggtaaaaatcgcccgcgccgccaccaaacgtagcggcaccatcgcttttagcggcgcgtatcacgggcgcacgcattacacgctggcgctgaccggcaaggtgaatccgtactctgcgggcatggggctgatgccgggtcatgtttatcgcgcgctttatccttgcccgctgcacggcataagcgaggatgacgctatcgccagcatccaccggatcttcaaaaatgatgccgcgccggaagatatcgccgccatcgtgattgagccggttcagggcgaaggcggtttctacgcctcgtcgccagcctttatgcagcgtttacgcgctctgtgtgacgagcacgggatcatgctgattgccgatgaagtgcagagcggcgcggggcgtaccggcacgctgtttgcgatggagcagatgggcgttgcgccggatcttaccacctttgcgaaatcgatcgcgggcggcttcccgctggcgggcgtcaccgggcgcgcggaagtaatggatgccgtcgctccaggcggtctgggcggcacctatgcgggtaacccgattgcctgcgtggctgcgctggaagtgttgaaggtgtttgagcaggaaaatctgctgcaaaaagccaacgatctggggcagaagttgaaagacggattgctggcgatagccgaaaaacacccggagatcggcgacgtacgcgggctgggggcgatgatcgccattgagctgtttgaagacggcgatcacaacaagccggacgccaaactcaccgccgagatcgtggctcgcgcccgcgataaaggcctgattcttctctcctgcggcccgtattacaacgtgctgcgcatccttgtaccgctcaccattgaagacgctcagatccgtcagggtctggagatcatcagccagtgttttgatgaggcgaagcagtagcgccgctcctatgccggaggcgacgctgcgcgtcttgtccggcctacggggatccaggtcggataaggcgtttacgccgcatccgacaatctgtacgtgaacaggaagaaatctatgttggccgggtaaggcggagccgctctccggcaaaaagaatcaataacaattatacgcgtgacccggcgcgggaaatgtcggggcgctctcccaagtgacacactttcgagaggattcaggatggggcaatcatcgcaaccacatgagttaggcggcgggctgaagtcacgccacgtcaccatgttgtctattgccggtgttatcggcgcaagtctgtttgtcggttccagcgtcgccatcgccgaagcgggcccggcggtattactggcctatctgttcgccgggctactggtggttatgattatgcggatgttggcggaaatggcggttgccacgcccgataccggttcgttttccacctatgccgataaagccattggtcgctgggcgggctataccatcggctggttgtactggtggttttgggtactggttatcccgctggaagccaacatcgccgccatgatcctgcactcatgggttccaggcattcccatctggttattttccctcgtcattaccctcgccttaactggcagtaacttattaagcgttaaaaactacggcgaatttgagttctggctggcgctgtgcaaagtcatcgctatcctggcctttattttccttggtgcagtcgcaattagcggtttttacccgtatgccgaagtgagcgggatctcaagattgtgggatagcggcggctttatgcccaacggtttcggtgcggtattaagcgcgatgttgatcaccatgttctcgtttatgggcgcagaaattgtcaccattgccgccgcggaatccgacacgccggaaaaacatattgtccgcgccaccaactcggttatctggcgtatttctatcttctatttatgttctatttttgtcgtcgtggcattaattccgtggaatatgcccggactaaaagccgtcggttcttatcgctcggtactggaattgctcaatattccccatgcgaaattaatcatggactgcgtgatattactttccgtaaccagttgcctgaactcggcgctgtataccgcgtcaaggatgctctactccttaagtcgtcgcggtgatgctcccgcggtaatgggtaaaatcaaccgcagtaaaaccccgtacgtggcggtgttactctccaccggcgcggcattcttaacggtggtggtgaactattacgcgcctgcgaaggtatttaaatttctgatcgacagctccggcgctatcgccctgctggtttatttagtcatcgccgtttcacagttgcggatgcgcaaaattctgcgagcagaaggaagcgaaattcgcttgcgaatgtggctttatccgtggctcacctggctagtcatcggctttattacctttgtgttggtagtgatgctattccgtccggcgcaacagttagaagtgatctccaccggcttattagcgatagggattatctgtaccgtgccaattatggctcgctggaaaaagctggtattgtggcaaaaaacacccgttcataatacgcgctgatcatgatcaggagtcacaccatgaccattacgtctctggatggctatcgctggctgaagaacgatattattcgcggtaattttcaaccggatgaaaaattacgaatgagtttgctgacatcgcgttatgcacttggcgttgggccgttacgggaagctctttcgcaactggtggcggaacggctggtcacggtggtgaatcaaaaagggtatcgggtggcgtctatgtcagagcaggagctgctcgatattttcgacgcccgcgccaatatggaagcgatgttagtgagtctggcgattgcccgcggtggcgatgagtgggaggcagacgttctcgcaaaagcgcatctgctgagtaagcttgaggcctgtgacgccagcgagaaaatgcttgatgagtgggatctgcgtcatcaggcgtttcatacggcaattgtggcgggctgtggttctcactatttgctgcaaatgcgtgaacggttgtttgatctggcggcgcgttatcgatttatctggctgcggcgaacggtgctttcggtggaaatgctggaggataaacacgatcagcaccagaccctgactgcggcggtactggcgcgagataccgcgcgcgccagtgagttaatgcgccagcatttactgacgccaattcccattatccagcaggcgatggctggcaattaactactcttccggaatacgcaacacttgccccggataaattttatccgggctttttagcatcggtttattcgcttcgaagattttattgtacagattagcgttaccgtagacctgtttggaaatggcactcagagtgtcgccagacttaacggtataaaactggctggcagtggctggtgtcgccgttttcacctgatcatcgacactggcaataccggaaatattccccaccgcaacaaggattttctccttcgcctcctgactcaggccgtcaccagtgaccgtcgctttgccgtcggcaatttgaatattcactttatcggcatccggtataccggttttgttcagatgctcctgcaccttcttcgcctgatcgtctttatcgtgctgacctgtaaccgcgtcccagagtttttctccggcatctttcacaaaattgaacagacccatagctacctcattcgttaacggaaacactcagaaagtgtagcagaggaacgcggcgcgttaacgccgcggggatgagcacaggtttaatcgcgggtttgcacccagaacgcgtgaatcaaaccggggatatacccaagcagtgtcaacagaatattaataatgaacgcccaaccgaaccctttaccgagcagcacgccgagcggcggcagaatgatggtgatgacgattctccagaaacccatatgtactccctataagaaaattactcattgtttaaaaagagattttatctcttaagcgtagtaattttagcggagcctgccagtttcagcttacgcttttactctcatttacgctgctgaggctggtatatgttgcatttttagtttagagtttacttaatttagaaaatacttaaataaatatgactgaactcgcgcaattacaggccagtgccgaacaggcagcggccttattgaaagcaatgagccaccctaaacgattgctgattctgtgcatgcttagcggttcccccggcaccagcgcgggagagctgacgcgcattaccggactgagtgcctctgcgacatcacagcatctcgctcgtatgcgggacgaagggcttatcgacagccaacgggatgcccaacgcattctatattccattaaaaatgaggcggtaaatgccattatcgccaccctgaaaaatgtctattgtccgtaaggagtcactatggctttgacaaccatttcgccgcatgatgcacaagaattaatcgcacgcggcgcaaagttaatcgatattcgtgatgctgatgaatatcttcgtgaacatattcctgaagcagatctggctccattatccgtgctggaacagtcaggtcttccggctaaattacgtcacgagcaaattatattccactgccaggcaggtaaacgcaccagtaataatgccgataaattagcagcgattgccgcccccgcagaaatctttttactcgaagatgggattgatggctggaaaaaagcaggattgccagtagcggtaaataaatctcaacccttgccgttaatgcgccaggtgcagatcgctgcgggtggtttaatattaatcggcgttgtactgggttataccgtaaatagcggtttcttcttattaagtggctttgttggtgccgggttactgtttgcaggaatcagcggtttttgtggaatggcaaggttgttagataagatgccgtggaaccaacgagcttgagaagcgacgccggacgcgccctagcagcgacatccggcctcagtaattagatcaggaaatcgtcgagagatttaccttctgccagcgcctgagcaattggcttcggtgtacggccctgaccggtccaggttttagtttcaccgttaacatcggtgaatttatatttcgccggacgcggctggcgttttttaccagcgcgtggtgcagcagcagagctattacccaataactcttccgggttaattccgtcagctttcatcagctccagccaggtgctaattttttcctggcgctctgccagttcacgctgctgctgttcttcttcttcacgtctttctttagtgacaaccctgaatttttcgagcatttcttcaagaacgtcaatggagaattcgcgagccatcgcacggagggtgcgaatgttatttaaactttgtaacattacggacataataaagaaaaccttttaacgccaaaacaaaaaaagtatttcgtcgcgtagtgtaagcgatcacttattatatttccacaaaatttaatctatttacagtcctgcgcgagattatttcagctgttattttctgaaactctcagaataatttcaagattatatattagccattttgatgagtaatttagattattggtgaacagagcggcgctctctgctcgctaattccgcaagcctgacaaaatcaaagtgaataaaaatgcaatataacagaataaaagaaaacatccatcactggtgctttctgctgttaatgtacattgtctggcataaaaaatgctgaaaatgacccagctactacatacaccgaattctctacgcttatagcgttacctcacccccaaactttcattagtgatattaaaggtaaggccatatctaattgatttaattaaaaataaatcatatcggcatgtaaaaatccacaatgtacaaaaaacgagccgttacggaatattttatctacaaaaactgactaaataaaaatttttcactaattgattagtcatagccagcgatatacgctatgcgaaaatgcagatggcaatgagatccactgctttcatctccattaacatcccattacgcttttattaaggagcattagcatgttctcaccgcagtcacgcttgcgtcatgcagttgcagatacgttcgcgatggttgtttactgttctgtcgtgaacatgtgtattgaagttttcctctccggaatgagcttcgaacagtctttttattccagattggtagcgattccggtgaacatcttaattgcatggccatacggtatgtaccgtgatctgtttatgcgcgcggcacgcaaagttagcccgtcgggctggataaaaaatctggcggatatcctggcttatgtgacgttccagtcaccggtgtatgtggcgatcttgttagtggtgggcgcagactggcatcagattatggcggcggtcagttcaaacatcgttgtttcgatgttgatgggggcggtttatggctacttcctcgattattgccgccgactgtttaaagtcagccgttaccagcaggtaaaagcctgactcttcttttcgcgactggcatcgccagtcgcgtctttaactggcttcgccaaataaaccattcaaataacgttcaagcgcaacacgcgaactaaagccatgcgggataccgtaatgctcgtgtcgctcgcctgctaaatagagcggaaattgctggtaatgatcgcaagttttaatatcggaagcgggttcagccagtgtcgaactgcgttcttttaatgttggatgaattaccagagcggtacgtcccattcgcgcttcgcgattaacatagacataattttccccacggcggtaaccatacgctttctgggttaccacatcgacagtaaaaccgactttttcaagtacgcgcgccacctcgtctggtcgtaaatacatatttgatcctcgttattatcaaccgcgggcctaccttacctgattgcgcattcacaacgctttcagaaaagtccataaagccgcgatgaacctcagttaagaaaattatggtctacactgaaaattacatcgaattctaatgggggatcatatgtttaaccgaccgaaccgcaacgacgttgatgatggcgtgcaggatatccagaatgatgtcaatcaattagctgacagcctcgaatctgtattgaagtcctggggcagcgacgccaaaggggaagctgaagccgcacgcagtaaagctcaggcattgctgaaagaaaccagggcgcgaatgcatggtcgtactcgcgtccagcaagccgcgcgcgatgccgttggctgcgcggattcttttgttcgtgaaagaccctggtgtagcgtgggtacagcagctgcggtagatatttttatcggcgcactgttaagcatgcgcaaatcgtagtgcaaaaatgataataaatacgcgtctttgaccccgaagcctgtcttcggggtttctttttgcctggtgaatcacaaaaatccccctaccccgtcacgctcatatccagggtaatttcgaccactatttgctatatattgtgtggttgaatcttttttcaactacatctagtatctctgtatcaacagagagacaacccgacgcgtatcatcgcgccgtatcttcattttaaacggaaatacgaatcatgcgcattactatttacactcgtaacgattgcgttcagtgccacgccaccaaacgggcgatggaaaaccggggctttgattttgaaatgattaatgtcgatcgcgttcctgaagcggcagaagcgttgcgtgctcagggctttcgtcagttgccggtagtgattgctggcgatcttagctggtctggtttccgtccggacatgattaaccgtctgcatccagcgccacacgcggccagtgcatgagccagctcgtctacttctccagcagctccgaaaacacgcagcgttttatcgaacgtttaggtctgcccgcggtgcgcatcccgctcaatgagcgggaacggattcaggtagacgagccttacatcctgatcgtgccctcttacggcggcggcggtacggctggcgcggtgccacgacaggtaattcgctttttaaacgacgagcacaaccgggcgttgcttcgcggcgttattgcttctggtaatcgcaactttggtgaggcgtatggccgcgccggagatgtgattgcccggaaatgcggcgtgccgtggctgtaccgttttgaactcatgggtacgcaaagcgatatcgaaaacgttcgtaaaggagtaaccgaattttggcaacgacaaccgcagaatgcctgacgcaggaaacgatggattaccacgcgctgaatgcgatgcttaacctctacgatagcgcaggtcgcattcagttcgataaagaccgccaggccgttgacgcctttattgcgacgcatgtgcgtccgaacagtgtgaccttcagtagccagcagcagcgcctgaactggctggtcaacgaaggttactatgatgaaagcgttcttaatcgctactctcgcgactttgtcattacgctgtttacccacgcacacaccagcggttttcgtttccagacattcctcggggcatggaagttttacaccagctatacgttgaagacattcgacggtaaacgttatctggaagattttgccgatcgagtaacgatggtggcgctgacgctggcacaaggcgatgagacgctggcgttgcaactgaccgatgaaatgctgtcaggacgctttcagccagccacgccaacattcctcaactgcggtaagcagcagcgcggcgaactggtttcctgttttttgctgcgtattgaagacaatatggagtcgattggtcgggcggtaaattccgcactgcagctgtcgaaacgcggcggcggcgtagcatttttgctgtcgaatctgcgagaagcgggcgcgccaattaaacgtattgaaaatcaatcttctggcgtaattccggtgatgaaaatgctggaagacgcattttcctatgccaaccaactcggcgctcgtcagggggctggtgcagtctatttacatgctcatcatcccgatattctgcgttttctcgacacgaaacgggaaaatgccgacgaaaaaatccgcattaaaacactgtcgcttggcgtggtgatcccggatatcactttccatctggcaaaagagaatgcgcagatggcgctgttttcgccttatgacgtagagcgagtttatggcaagccgtttgccgatgtggccatcagccaacactatgacgaactggttgccgatgaacgcattcgcaaaaaatacctcaacgcccgtgatttcttccagcgactggcagaaatccagtttgagtccggctatccctacatcatgtatgaagacacggtaaaccgtgctaaccctatcgccgggcgcataaatatgagtaatctctgctcagaaattttgcaggttaacagcgcctcagagtatgacgagaatctcgactatacccgcacaggccatgatatttcctgcaatttaggttcgttgaatattgcgcacaccatggattcccccgattttgcccgcacggtagagactgccgtgcgcggtttaacggcagtatcagatatgagtcatatccgcagcgtgccgtccatcgaagccggaaatgccgcctcgcacgccatcggactggggcagatgaatttacacggctatctggcgcgagaaggcatcgcttatggttcgccggaagcactggatttcaccaatctctatttctatgccatcacctggcatgcactgcgtacctcgatgttgctggcacgcgaacgcggtgaaaccttcgccgggttcaaacagtcacgctatgccagtggtgaatattttagccaatatctgcaagggaactggcagccgaaaacggcgaaagttggcgaactgtttacccgtagcggtattacgttacctacccgtgagatgtgggcgcagctgcgcgacgacgtgatgcgctacggcatatacaaccagaatcttcaggcggtgccgccaaccggttctatctcttatatcaaccatgctacgtcgagtattcatccgattgtggcgaaagtagagatacgcaaagagggcaaaacaggacgcgtttactaccctgccccgtttatgactaacgagaatctggcgctgtatcaggacgcttacgaaattggcgcagaaaagatcatcgacacctacgcggaagcgactcgccatgtcgatcaggggctgtcgctgacgctttttttccccgataccgccaccactcgcgatatcaacaaagcgcagatttacgcctggcgcaagggtatcaaaacgctctattacatccgcctgcgtcagatggcgctggaaggcactgaaattgaaggctgcgtctcctgtgcactttaaggaatatctatgaaactctcacgtatcagcgccatcaactggaacaagatatctgacgataaagatctggaggtgtggaatcgcctgaccagcaatttctggctaccagaaaaggtgccgctgtcgaacgatattcctgcctggcagacattaactgtcgtagaacaacaactgacgatgcgcgtttttactggcctgacgctgctcgacacgctgcaaaatgttatcggcgcgccttctctgatgcccgatgcactcacgcctcatgaagaagcggtattatcgaatatcagctttatggaagcggttcatgcccgctcttacagttcgattttctcgacgctatgccagaccaaagatgtcgatgccgcctacgcctggagtgaagaaaacgcaccgttgcagcgaaaagctcagattattcagcaacattatcgcggtgatgatccgctgaaaaagaaaatcgccagtgtgtttcttgaatcttttttgttctattccggtttctggctgccgatgtatttttccagccgcggaaagctgaccaataccgcggacctgatccgtctgattatccgcgatgaagcagtccacggttactacataggctataaatatcagaaaaacatggaaaagatatctctgggacaacgtgaagagttgaagagtttcgccttcgatttgttgctggaactctacgacaacgagttgcaatacaccgatgagctgtacgccgaaaccccgtgggctgacgatgtgaaagcgtttctctgttacaacgccaataaggctttgatgaatctgggctacgaaccgttatttcccgcagaaatggcggaagtgaatccggcaatcctcgccgcgctttcgccgaatgccgatgaaaatcacgatttcttttccggttcaggctcctcttatgtgatggggaaagcggttgaaacagaagatgaagactggaatttctgagggtgttattttcaaaaatatcactacccgcagcagggaaataattcccgccaaatagctttttatcacgcaaataatttgtggtgatctacactgatactctgttgcattattcgcctgaaaccacaatattcaggcgttttttcgctatctttgacaaaaaatatcaactttctcgatttgctctcagcccttatatcacgggaaattccggcgatttgctcgcatcaatattcatgccacatttgccatcaggggttgcctcagattctcagtatgttagggtagaaaaaagtgactatttccattgggtaatatatcgacatagacaaataaaggaatctttctattgcatggcaattaaattagaaattaaaaatctttataaaatatttggcgagcatccacagcgagcgttcaaatatatcgaacaaggactttcaaaagaacaaattctggaaaaaactgggctatcgcttggcgtaaaagacgccagtctggccattgaagaaggcgagatatttgtcatcatgggattatccggctcgggtaaatccacaatggtacgccttctcaatcgcctgattgaacccacccgcgggcaagtgctgattgatggtgtggatattgccaaaatatccgacgccgaactccgtgaggtgcgcagaaaaaagattgcgatggtcttccagtcctttgccttaatgccgcatatgaccgtgctggacaatactgcgttcggtatggaattggccggaattaatgccgaagaacgccgggaaaaagcccttgatgcactgcgtcaggtcgggctggaaaattatgcccacagctacccggatgaactctctggcgggatgcgtcaacgtgtgggattagcccgcgcgttagcgattaatccggatatattattaatggacgaagccttctcggcgctcgatccattaattcgcaccgagatgcaggatgagctggtaaaattacaggcgaaacatcagcgcaccattgtctttatttcccacgatcttgatgaagccatgcgtattggcgaccgaattgccattatgcaaaatggtgaagtggtacaggtcggcacaccggatgaaattctcaataatccggcgaatgattatgtccgtaccttcttccgtggcgttgatattagtcaggtattcagtgcgaaagatattgcccgccggacaccgaatggcttaattcgtaaaacccctggcttcggcccacgttcggcactgaaattattgcaggatgaagatcgcgaatatggctacgttatcgaacgcggtaataagtttgtcggcgcagtctccatcgattcgcttaaaaccgcgggtgatgctgccaacttactgatttagtgtatgatggtgtttttgaggtgctccagtggcttctgtttctatcagctgtccctcctgttcagctactgacggggtggtgcgtaacggcaaaagcaccgccggacatcagcgctatctctgctctcactgccgtaaaacatggcaactgcagttcacttacaccgcttctcaacccggtacgcaccagaaaatcattgatatggccatgaatggcgttggatgccgggcaacagcccgcattatgggcgttggcctcaacacgattttacgtcacttaaaaaactcaggccgcagtcggtaacctcgcgcatacagccgggcagtgacgtcatcgtctgcgcggaaatggacgaacagtggggctatgtcggggctaaatcgcgccagcgctggctgttttacgcgtatgacagtctccggaagacggttgttgcgcacgtattcggtgaacgcactatggcgacgctggggcgtcttatgagcctgctgtcaccctttgacgtggtgatatggatgacggatggctggccgctgtatgaatcccgcctgaagggaaagctgcacgtaatcagcaagcgatatacgcagcgaattgagcggcataacctgaatctgaggcagcacctggcacggctgggacggaagtcgctgtcgttctcaaaatcggtggagctgcatgacaaagtcatcgggcattatctgaacataaaacactatcaataagttggagtcattaccaaaaccgcgttaacgcagcagcaaggtcttgatgcggcgctgattgatgcgccgttagcagtcgatgcacaaacgcctcttagcgagttgctctctcatgtcggacaggcaccctgtgcggtgcccgtggtcgacgaggaccaacagtatgtcggcatcatttcgaaaggaatgctgctgcgcgctttagatcgtgagggggtaaataatggctgatcaaaataatccgtgggataccacgccagcggcggacagtgccgcgcaatccgcagacgcctggggtacaccgacgactgcaccgactgacggcggtggtgctgactggctgaccagtacgcctgcgccaaacgtcgagcattttaatattctcgatccgttccataaaacgctgatcccgctcgacagttgggtcactgaagggatcgactgggtcgttacccatttccgtcccgtcttccagggcgtgcgcgttccggttgattatatcctcaacggtttccagcaattgctgctgggtatgcccgcaccggtggcgattatcgttttcgctctcatcgcctggcagatttccggggtcggaatgggtgtggcgacgctggtttcgctgattgccatcggcgcaatcggtgcctggtcgcaggcaatggtgactctggcgctggtgttaaccgccctgctgttctgtatcgtcatcggtttgccgttggggatatggctggcgagaagtccgcgagcggcgaaaattattcgtccactgcttgatgccatgcagaccacgccagcgtttgtttatctggtgccaatcgtcatgctatttggtatcggtaacgtgccgggcgtggtggtgacgatcatctttgctctgccgccgattatccgtctgaccattctggggattaaccaggttccggcggatctgattgaagcctcgcgctcattcggtgccagcccgcgccagatgctgttcaaagttcagttaccgctggcgatgccgaccattatggcgggcgttaaccagacgctgatgctggccctttctatggtggtcatcgcctcgatgattgccgtcggcgggttgggtcagatggtacttcgcggtatcggtcgtctggatatggggcttgccaccgttggcggcgtcgggattgtgatcctcgccattatcctcgatcgtctgacgcaggccgttgggcgcgactcacgcagtcgcggcaaccgtcgctggtacaccactggccctgttggtctgctgacccgcccattcattaagtaactctgcacttgcccggtgacgccgggcattatcaccctgccaaaaaaaggaataacaatgcgacatagcgtactttttgcgacagcgtttgccacgcttatctctacacaaacttttgctgccgatctgccgggcaaaggcattactgttaatccagttcagagcaccatcactgaagaaaccttccagacgctgctggtcagtcgtgcgctggagaaattaggttataccgtcaacaaacccagcgaagtagattacaacgttggctacacctcgcttgcttccggcgatgcaaccttcaccgccgtgaactggacgccactgcatgacaacatgtacgaagctgccggtggcgataagaaattttatcgtgaaggggtatttgttaacggcgcggcacagggttacctgatcgataagaaaaccgccgaccagtacaaaatcaccaacatcgcacaactgaaagatccgaagatcgccaaactgttcgataccaacggcgacggaaaagcggatttaaccggttgtaaccctggctggggctgcgaaggtgcgatcaaccaccagcttgccgcgtatgaactgaccaacaccgtgacgcataatcaggggaactacgcagcgatgatggccgacaccatcagtcgctacaaagagggcaaaccggtgttttattacacctggacgccgtactgggtgagtaacgaactgaagccgggcaaagatgtcgtctggttgcaggtgccgttctccgcactgccgggcgataaaaacgccgataccaaactgccgaatggtgcgaattatggcttcccggtcagcaccatgcatatcgttgccaacaaagcctgggccgagaaaaacccggcagcagcgaaactgtttgccattatgcagttgccagtggcagatattaacgcccagaacgccattatgcatgacggcaaagcctcagaaggcgatattcagggacacgttgatggttggatcaaagcccaccagcagcagttcgatggctgggtgaatgaggcgctggcagcgcagaagtaatttttattcgggcggataaggcgtttttgccgcatccgccgttctgtgcacaatgcctgatgcgacgctggcgcgtcttatcatgcctacaaaccacatcgcacatttcaacaatctatctttcatcccatattcatcaacatccgctattattgatttccagcttaatcatcacctgatgaacaaaaataatgactaaacctaatcatgagcttagcccggcgctgatcgtgctgatgtctatcgccaccggtctggcggtagccagtaactattacgcccagccattgctcgacaccatcgcgcgtaacttttccctttccgccagttcggcaggctttattgttaccgccgcgcagttgggctatgccgcaggtctactgtttcttgttcccctcggtgatatgtttgaacgccgccgcctgattgtctcgatgaccttactggcggcatgttgattaccgccagcagtcagtcgctggcgatgatgatcctcggtacggcattaaccggtttattctcagtcgtggcacaaattctggttccgctggcagcgacgctggcttcaccggataaacgcggcaaagtggttggcactattatgagcggtctgctgttggggatcttgctggcacggacagttgccggattgctggcgaatctcggcggctggcgcaccgtcttttgggttgcttcggtgttaatggcactgatggcgctggcattatggcgtggtctgccacaaatgaaatcagaaacccacctcaactacccacagttgttgggttccgttttcagtatgtttatcagcgataaaattctgcgtacccgcgcgttgctgggctgcctgacctttgccaatttcagcattctctggacctcaatggcctttttgcttgccgctccaccttttaactacagcgatggtgtcattggtctgtttggacttgcgggagctgccggagcgttgggcgctcgtccggcgggcggttttgccgataagggcaaatcgcaccacaccacaactttcggtctgctgctgctattactttcatggctggcgatctggtttggtcacacttccgtactggcgttgattatcggaatcctggtgctggatctcaccgtgcagggcgtgcatatcactaaccagacggtaatttatcggatacatcctgatgcgcgcaatcgcctgaccgcaggttacatgactagctactttattggcggtgccgccggttcgctaatttcagcctcagcctggcaacatggcggttgggctggcgtttgtctggctggcgcgacgattgccctggttaacttactggtctggtggcgaggttttcatcgtcaggaagccgcaaattaagcaatcagcaaccgttttcgtggctttacacttataagggtgttaagaagcccatcagtctgataaggttaagatattcattcagtctatttataatattaacaatcgttaagcgtacactctatggaaagccctactccacagcctgctcctggttcggcgaccttcatggaaggatgcaaagacagtttaccgattgttattagttatattccggtggcctttgcgttcggtctgaatgcgacccgtctgggattctctcctctcgaaagcgtttttttctcctgcatcatttatgcaggcgcgagccagttcgtcattaccgcgatgctggcagccgggagtagtttgtggattgctgcactgaccgtcatggcaatggatgttcgccatgtgttgtatggcccgtcactgcgtagccgtattattcagcgtctgcaaaaatcgaaaaccgccctgtgggcgtttggcctgacggatgaggtttttgccgccgcaaccgcaaaactggtacgcaataatcgccgctggagcgagaactggatgatcggcattgccttcagttcatggtcatcgtgggtatttggtacggtaataggggcattctccggcagcggcttgctgcaaggttatcccgccgttgaagctgcattaggttttatgcttccggcactctttatgagtttcctgctcgcctctttccagcgcaaacaatctctttgcgttaccgcagcgttagttggtgcccttgcaggcgtaacgctattttctattcccgtcgccattctggcaggcattgtctgtggctgcctcactgcgttaatccaggcattctggcaaggagcgcccgatgagctatgaggttctgctgcttgggttactagttggcgtggcgaattattgcttccgctatttgccgctgcgcctgcgtgtgggtaatgcccgcccaaccaaacgtggcgcggtaggtattttgctcgacaccattggcatcgcctcgatatgcgctctgctggttgtctctaccgcaccagaagtgatgcacgatacacgccgtttcgtgcccacgctggtcggcttcgcggtactgggtgccagtttctataaaacacgcagcattatcatcccaacactgcttagtgcgctggcctatgggctcgcctggaaagtgatggcgattatataacccacaagaatcatttttctaaaacaatacatttactttatttgtcactgtcgttactatatcggctgaaattaatgaggtcatacccaaatggatagttcgtttacgcccattgaacaaatgctaaaatttcgcgccagccgccacgaagattttccttatcaggagatccttctgactcgtctttgcatgcacatgcaaagcaagctgctggagaaccgcaataaaatgctgaaggctcagggaattaacgagacgttgtttatggcgttgattacgctggagtctcaggaaaaccacagtattcagccttctgaattaagttgtgctcttggatcatcccgtaccaacgcgacgcgtattgccgatgaactggaaaaacgcggttggatcgaacgtcgtgaaagcgataacgatcgccgctgcctgcatctgcaattaacggaaaaaggtcacgagtttttgcgcgaggttttaccaccgcagcataactgcctgcatcaactctggtccgcgctcagcacaacagaaaaagatcagctcgagcaaatcacccgcaaattgctctcccgtctcgaccagatggaacaagacggtgtggttctcgaagcgatgagctaacgcgtcatctcgctcaaaaatccagatttataaaagaaaaaatgactggccagcatcgcaacatgctggcctttttggcaagcaggtcggctcagccgatgagttaagaagatcgtggagaacaatatgagcgcaaatgcggagactcaaaccccgcagcaaccggtaaagaagagcggcaaacgtaagcgtctgctcctccttctcaccttgctctttataattattgccgtagcgatagggatttattggtttttggtactgcgtcacttcgaagaaaccgatgacgcatacgtggcagggaatcaaattcaaattatgtctcaggtgtctggcagcgtgacgaaagtctgggccgataacaccgattttgtaaaagaaggcgacgtgctggtcactctcgacccgacagatgctcgccaggcgtttgaaaaagccaaaactgcactggcttccagcgttcgccaaacccaccagctgatgattaacagcaagcagttgcaggcgaatattgaggtgcagaaaatcgccctcgcgaaagcacaaagcgactacaaccgccgtgtgccgctgggcaatgccaacctgattggtcgcgaagagctgcaacacgcccgcgacgccgtcaccagtgcccaggcgcaactggacgtcgcgattcaacaatacaatgccaatcaggcgatgattctggggactaaactggaagatcagccagccgtgcaacaggctgccaccgaagtacgtaacgcctggctggcgctggagcgtactcgtattatcagtccgatgaccggttatgtctcccgccgcgcggtacagcctggggcgcaaattagcccaacgacgccgctgatggcggtcgttccagccaccaatatgtgggtggatgccaactttaaagagacgcagattgccaatatgcgtatcggtcagccggtcactatcaccacggatatttacggcgatgatgtgaaatacaccggtaaagtggttggtctggatatgggcacaggtagcgcgttctcactgcttccagcgcaaaatgcgaccggtaactggatcaaagtcgttcagcgtctgcctgtgcgtatcgaactggaccagaaacagctggagcaatatccgctgcgtatcggtttgtccacgctggtgagcgtcaataccactaaccgtgacggtcaggtactggcaaataaagtacgttccactccggtagcggtaagcaccgcgcgtgaaatcagcctggcacctgtcaataaactgatcgacgatatcgtaaaagctaacgctggctaatccagaggtgcgtgtgatgcaacagcaaaaaccgctggaaggcgcgcaactggtcattatgacgattgcgctgtcactggcgacattcatgcaggtgctggactccaccattgctaacgtggcgatccccactatcgccgggaatctgggctcatcgctcagccagggaacgtgggtaatcacttctttcggggtggcgaatgccatctcgatcccgcttaccggctggctggcaaagcgcgtcggggaagtgaaactgttcctttggtccaccatcgcctttgctattgcgtcgtgggcgtgtggtgtctccagcagcctgaatatgctgatcttcttccgcgtgattcaggggattgtcgccgggccgttgatcccgctttcgcaaagtctattgctgaataactacccgccagccaaacgctcgatcgcgctggcgttgtggtcgatgacggtgattgtcgcgccaatttgcggcccgatcctcggcggttatatcagcgataattaccactggggctggatattcttcatcaacgtgccgattggcgtggcggtggtgttgatgacactgcaaactctgcgcggacgtgaaacccgcaccgaacggcggcggattgatgccgtggggctggcactgctggttattggtatcggcagcctgcagattatgctcgaccgcggtaaagagctggactggttttcatcacaggaaattatcatccttaccgtggtggcggtggtggctatctgcttcctgattgtctgggagctgaccgacgataacccgatagtcgatctgtcgttgtttaagtcgcgcaacttcaccatcggctgcttgtgtatcagcctcgcgtatatgctctacttcggcgctattgttctgctgccgcagttgttgcaggaggtctacggttacacggcgacctgggcaggtttggcctctgcgccggtagggattattccggtgatcctgtcgccgattatcggccgcttcgcgcataaactggatatgcggcggctggtaaccttcagctttattatgtatgccgtctgcttctactggcgtgcctatacctttgaaccaggtatggattttggcgcgtcggcctggccgcagtttatccaggggtttgcggtggcctgcttctttatgccgctgaccaccattacgctgtctggtttgccaccggaacgactggcggcggcatcgagcctctctaactttacgcgaacgctggcggggtctatcggcacgtcgataaccacgaccatgtggaccaaccgcgagtcgatgcaccatgcgcagttgactgagtcggtaaacccgttcaacccgaatgcccaggcgatgtacagtcaactggaagggcttgggatgacgcaacagcaggcatcaggctggattgcccagcagatcaccaatcaggggctgattatttccgccaatgagatcttctggatgtcagccgggatattcctcgtcctgctggggctggtgtggtttgctaaaccgccatttggcgcaggtggcggcggaggcggtgcgcactaagtacaactaagccagttcatttgaactggcttttttcaattaattgtgaagatagtttactgactagatgtgcagttcctgcaacttctctttcggcagtgccagttcttcgttgctgttgatgcgtacgtcacgttccagaatgctacgcgcaatatcctgcgcttcctgcaacgagtgcatctggtaagtgccacactggtagacgttcagttccgggatctgattctgatcctgcactttcagcacgtcttccattgccgctttccaggcatcagcaacacgctgctcatctggcgtaccaatcagactcatataaaaaccggtgcggcagcccattggcgagatatcgataatctctacaccattaccgttaagatggttacgcataaaaccagcaaacaggtgctccagggtatggatccctctttctggcatcacttctttgttcggcacgcagaagcgcagatcgaacacggtgattgcgtcgccatgcggggtgttcattgttttcgccacccgaactgcaggcgcttccatccgggtatgatcgactgtgaagctatctaacaacggcatttagccacctccggtaatttttttaaaaattttctgaactctttcttcccaggcgagtctgagtatatgaaagacgcgcatttgttatcatcatccctgaattcagagatgaaattttggccactcacgagtggcctttttcttttctgtcaggcgtgtttttccagccacaccgcaaacggttcggtatcagcggcttccatttcctgctgacggcgttcagacgcctcgcgctcggctacaaaatcctcttcgcgcagaatttccagcggctcttcacgcagcagattacggtaggcttctgcaaatgctttgcctgttccgccaataccagtatcaatcatagaccttaagatacgggcagagaaagtcagatcgggattatcgaagcaggcaaccagttcatcacacactttctgatacgcttcgccgccgttaatactatccagcgtttgcgcgacgcgtttcagatcgcggaacagatctttacccacctgcggtaacgggaactgtgcggtttcgcagccgatacccagcgtcagacccggtttgcgaccttcgaggatcacccggttccagttaacgcgtgtacaggcaagttcgctactgctcatttccggtgcatcagccagcgcacaccagaccataaacaggtcgaggaatcgcacctgctgttcatctacaccaatcggcgagaacgggttgatgtccagcgaacgcacttcaatatattcaatgccgccacgtaacagcgcatcagaaggcgactcgccgctgcgggtaacgcgttttggacgaatcggcgcgtacagttcgttttcaatctgcaacacgttgctgttgatttgcagcctcttaccgtctttctcaataccaatcttcgcgtactcttccgatggcgttttgattgcctgtttaaggcccgctacgtactcgtaaagatcgttgaaggtaataccaagattgctttgcgatttattggtatagccgagatcgctcaaacgaagagaggtcgcatacggcaggtaatacataccgcactcggttttctcaaacggcagcgacgttggttttccttgcaggaaagaagaacaaatcgccggagatgcaccaaacagataaggaatgacccaaccgaaacgatagtaattgcggataacgcggaaatagcccgcagaaattttctctttggcatcagcgcccgagatatcaccgcacttcgcttgccagaatgccattggcaaagagaaattgtagtgcacgccggaaatggtttgcatcagcgcgccgtagcgatttttcagcccttcacgatacagcgttttaaagcgtccggtgttagaagtgccgtactgtgccagttcgatgtcctgaccttctgcgatgtagcatggcatacttaacggccacatccgctcatcgcccatattgcgcgccgtataacgatgcagatcgcgcataaaggtcagcatatgttcaatatcaccatccactggtgtaatgaattccagcaatgcttccgcaaaatcggtagtaatccatttgtgcgtcagtgcggaacctaatgcttcaggatgacctgttgttgccagtgtgccatcagcattaacacgcaaagtttcgcgctccagcccacgctgtatcccctttaacgcctgaggatgtttttccagccaggccagcgcctgtgatacgtccgggatcaaattgacctcccgcctgtcaaaatcgttttaattagcataactgtaatggtgaccatatgtgcaggcctacaattagtgccaccacatcatgccctgaacggtcgctgctgcaactgcaacatagcgtaacgctttaccaaggcacaaaaaaaagattaccggtccccacgagatgcgcatccatcccgctaacagacacagtaaatcgccaaccacgggcatccagcttaataatagcgtgactgcaccatagcgtttcagccagccggtagctttctcttgccagcgcgatgttttacgcaatggaaagaaacgcccaaggataacgttagttaaccctccaaggctattacccattgttgctgttaaaactaaaacccagggatgactgatcccggaaagcaacattgccaccagcacgacttcggagttgccgggtaatagtgtagcgctgagaaaactactggcaaacaacgagaaaagcgataacgcttcactcacagcaagcgaacatccacggcgtccatgcctgctgcacgggccgcctgaataccgaaatcggcatcttcaaagaccacacactgcgtcggttgcacgcccatacgctgcgcgcacaacaaaaatgtgtctggcgcgggtttatggtgtttgacgtgatcggcagcgacgacggcgtcaaaataatggcgtaatcccaggtgcgccagcaatgcctcagcgatggcgctttcactccccgttcctacagccattgggcgacgaccatgccaacttttcaccacatcaacaagaggaagcggttcgacgctatccagcagcatacttcttactgcttctgttttttcacgcgctaacgcatgcgggtcgagatcggcctgattcagctcaataattgcctgagcaatacgccaggtgggcgatccattaagcgcaatcatcgcctgaatatcgtactgaagaccgtagtgccctaatacttcgcgccacgctttacggtgcgtaggctccgtatccaggattgtgccatccatatcaaaaattaaacctgcataacgctcgtacatggtcttctcgcaagtcgaaaaatatgacgctactttagcgtaattgcttgattttgtcgctgatggcgaaggagaagaaaattcaggaaatggataaaggagttatttagaaatgagatatttttgaaggaaattttttggagaagatggtgcatccgggaggatgactcactgacgttcgcccttcgggccgttgctggcgcaacgttatccttcctggtgcctgcggttaataccgctatctcttcgataccttcattgctgaaggttacggagaatatggtgcatccgggaggattcgaacctccgaccgctcggttcgtagccgagtactctatccagctgaactacggatgcatcgggaaaacttattctactgctgatattgataccgctactaaagccatatcaattaagagatggtgcatccgggaggattactcgccttgcggctcgcccttcgggccgttgctaaagcaacgttatcatccctagtgcctgcggttaattccgctacctcttcgataccttcattgctgaagatttcggagaatatggtgcatccgggaggattcgaacctccgaccgctcggttcgtagccgagtactctatccagctgagctacggatgcatcgggaaatttattttactgctgatattgataccgctactaaagccatatcaagtaagagatggtgcatccgggaggattcgaacctccgaccgctcggttcgtagccgagtactctatccagctgagctacggatgcatcgggaaacttactttactgcagattttttgataccgctactaaagccgtatcaagtaagagatggtgcatccgggaggattactcgccttgcggctcgcccttcgggccgttgctaaagcaacgttatcctccctggtgcctgcggttattaccgccacctcttccataccttcatcgctgaaagtacgtagaatatggtgcatccgggaggattcgaacctccgaccgctcggttcgtagccgagtactctatccagctgagctacggatgcaaatggcggtgaggcggggattcgaaccccggatgcagcttttgaccgcatactcccttagcaggggagcgccttcagcctctcggccacctcaccacacgcctcttacgagtgcttcgaagaacttgtttatcgctcatcgtcgctgcgtggcgcacatattactttctgagacttataagtcaaacaatttttcctacacttttatcgtttgcacacttcacgttcaattagtctgtaaaaacgtcaaaaagagtgttttatcaacagaagaatggaggtctgacagatagtagtaatgcaaaaaaatggagacttaagttgaatgaacgggagtaaagcgaaaagactatagagtgaaggagaaattttgagggtgcgtctcaccgataaagatgagacgcggaaagattagtaactggactgctgggatttttcagcctggatacgctggtagatctcttcacggtgaacagaaacttccttcggggcatttacgccaatacgtacctggttgccctttacccctaaaactgtcacggtgacctcatccccaatcatgagggtctcaccaactcgacgagtcagaatcagcattctttgctccttgaaagattaaaagagtcgggtctctctgtatcccggcattatccatcatataacgccaaaaagtaagcaatgacaaacacattacatctaagcagtcatggcattacattctgttaaacctaagtttagccgatatacacaacttcaacctgactttatcgttgtcgatagcgttaatgcgaatgccgtgaagcgagtccacggcattgcctgacgcttatattattgcaatttcgcgctgacccagcctttcacactggctaacgctgcaggtaaggccgcagcatccgtaccaccggcttgcgccatgtcaggacgtccaccacccttgccgcccacctgctgagcgaccataccaatcagttcccctgctttcacacgatctgtgacgtccttagatacgcctgcaatcagagaaaccttaccttcgactaccgttgccagcacgataattgtcgaccccagctgattttttaaatcgtcaaccatggtacgcaacattttcggctcaacaccgctaagctcgctaaccaacagcttaacaccattaacatcaattgccttactggaaagatttgcgctctcctgtgcggcagcttgttctttaagctgttgtaactctttttccagctgacgcgtacgttccagtactgagcgcactttatcagccagattattgctatcgcctttcagcagatgcgcgacttcgcttaagcgatcgctgtctgcatgaacggtggcgatagcaccttctccggttaccgcttcgatacgacgaacgcctgcagcagtacccgattcagagatgatgcggaacagaccaatatcaccagtgcggctggcgtgagtaccgccacacaactcggtagagaaatcgcccatgctcagcacgcgtacgcgctcatcatacttctcgccgaacagcgccatcgcacctttcgctttcgccgcttcgagatccatgatgttggtttcgatcggcaaattgcgacgaatctgtgtgttcaccaggtcttcgaccgcacgaatctcttctggtttcatcgcttcgttgtgtgagaagtcgaagcgcagcaccttgtcgttaaccagtgaacctttctgcgatacatgagtacccagaacctggcgcagcgcagcgtgcatcaggtgcgttgcggagtgattcagacgaatacgggcgcgacgagcctcatcaacatcagcctgcaccgcgtcgcccactttcagagaacccgcagcaagtttaccgatgtgaccaatcgcctggccgtatttctgcgtatcttccaccgcaaaggagaagttagcgcctttcagttcgcctttatcgccaacctgaccgccggattccgcatagaatggcgtttgatccagcacgaccacagcttcctggcctgcattgatggcatcaaccgctttaccatcaacaaacagcgcagtcactttgccgttcagttccagatggtcatagcctttaaattcagatgcactgtcaacacggatcattgcgttgtaatcggcaccaaagccgctggcttcgcgcgcgcgacgacgctgctcttccattgcagcttcaaaaccagcttcgtcaactttgatgttgcgctcacgacaaacatcagccgtcaggtcaaccgggaagccataggtgtcgtacagacggaaagcagtttcaccatccagcgtatcaccagaaagttttgccagctcttcatccagcaacgccagaccgcgctccagagtacgagcaaactgctcttcttcagtcttcagcacctgctcaacctgcgcctgctggcgtttcaggtcttcacccgcagagcccataacgtcgatcagcggaccaaccagtttgtagaagaaggtttctttcgcgccgagcatattaccgtgacgcactgcgcgacgaatgatacgacgcagtacataaccacggttttcattggacggcattacgccatccgcgatcaggaacgcacaagaacgaatgtggtcagcgattacgcgcagcgatttattgctcagatcggttgcgccagtgactttcgctaccgcctggatcagcgtgcggaacaggtcgatgtcatagttagagttaacgtgttgcagcaccgcagcaatacgctccagacccataccggtatctacagacggcttcggcagcggttccatcgtgccatcggcctggcggttgaactgcatgaagacgatgttccagatctcaatgtagcggtcgccgtcttcttccgggcttcccggagggcccccccaaatgtggtcgccgtgatcgtagaagatttcggtgcacgggccgcacggaccagtgtcacccatctgccagaagttgtcagatgcgtatggcgcacctttgttatcgccgatgcgaataatacgttcgcgcgggatccctacttctttttcccagatttcgtaggcttcgtcgtcgctttcatagacggtaacccacagacgctctttcggcagggcaaaccatttttcgctggtcagcagttcccatgcaaactgaatggcatcgtgtttgaaatagtcgccgaagctgaagttgcccagcatttcgaagaaggtatggtgacgcgcggtgtaaccgacgttttccaggtcgttgtgtttaccacccgcacgcacgcagcgttgggaagtggtagcgcgggaataattacgcttgtcgagcccaaggaacacatccttgaactggttcatcccggcgttggtaaacaacaaagttgggtcgttatggggtaccagggagctgctggcaactacctgatgtcccttactatggaaaaagtcgagaaacgcctgacggatctcagcggtgctcttgctcataattatcctgaaatcaagctaacgaaatatcgccaccagctccagcgtgtcttaaccgccgggctggtaactgaaaagtgggaataagataagttttcttgactgggaagtaaaataccgtatgcgttcagtcggcaaaatttcgccaaatctcctggatatcttccatcagatagccacgatagagcagaaaacgctggatcttaactttttctgaaaagacagttggcaaaggttcgccatattttcgcgtcgcctgatcgcgcgccagtgcgcaccagtcgatgtcacattcacgcatcgctttttctgtcgcttcgcgggaaatacctttctgattcagttcctggcgaatacgcgcaggtccataacctttgcggctacggctggcgataaagcgcgcaacaaatcggctgtcatcgagatagccatgttcatggcaccaggcaataacgcgctcgtaatcttctgccgtagcatcaatctcttctgggccatttttgcccataatcggtgccgcgagtttacgtcgcagttcttgctcactgtgatcgcgcaccgccagaatgcgtaccgcacgatccaacaggcgagcatatgccgggcgacgggatgttgattctgtcatggcatatccttacaacttaaaaaagcaaaagggccgcagatgcgacccttgtgtatcaaacaagacgattaaaaatcttcgttagtttctgctacgccttcgctatcatctacagagaaatccggcgttgagttcgggttgctcagcagcaactcacgtactttcttctcgatctctttcgcggtttccgggttatctttcagccaggcagtcgcattcgctttaccctgaccgatcttctcacctttgtagctgtaccacgcgcctgctttctcgatcagcttctcttttacgcccaggtcaaccagttcgccgtagaagttgataccttcgccgtagaggatctggaattcagcctgtttaaacggcgcagcgattttgttcttcaccactttcacgcgggtttcgctacccaccacgttttcgccctctttcaccgcgccgatacgacggatgtcgagacgaacagaggcgtagaatttcagcgcgttaccaccggtagtggtttccgggttaccgaacatcacaccaattttcatacggatctggttgatgaagatcagcagcgtgttggactgcttcaggttacccgccagcttacgcatcgcctggctcatcatacgtgccgcaaggcccatgtgagagtcgtcgatttcgccttcgatttccgctttcggcgtcagtgccgccacggagtcaacgacgataacgtctactgcgccagaacgcgccagggcgtcacagatttccagtgcctgctcgccggtgtccggctgggagcacagcaggttgtcgatatcgacgcccagtttacgtgcgtagattgggtccagcgcgtgttcagcatcgataaacgcacaggttttaccttcacgctgcgctgcggcgatcacctgcagcgtcagcgtggttttaccggaagattccggtccgtagatttcgacgatacggcccatcggcagaccacctgccccaagcgcgatatccagtgaaagcgaaccggtagagatggtttccacatccatggaacggtcttcacccaggcgcatgatggagcctttaccaaattgtttctcaatctggcccagtgctgccgccaacgctttctgtttgttttcgtcgatagccatttttactcctgtcatgccgggtaataccggatagtcaatatgttctgttgaagcaattatactgtatgctcatacagtatcaagtgttttgtagaaattgttgccacaaggtctgcaatgcatacgcagtagcctgacgacgcaccgcatcacggtcgccgctgaagcattcccgccgggtaatgccttcaccgcgggcagtggcaaaagcaaaccagacggtgccgacaggcttctcttcactgccgccatccggcccggcgataccactaatagacacggcataatcagcacgagccgctttcagtgcgcctatcgccatttccaccacgacgggttcactcaccgcgccatgctgcgccagcgtctcttcgcgtacgccgatcatctgcgctttggcttcgttactgtaggtgacaaatccgcgttcaaaccaggcggagctaccggcaatatcggtaatcactttcgctacccaaccaccggtacaagactcggcagttgttacggttgcgccacgggctttcagcgcctgcccaacctgttcacttaactgcatcagttcactgtcagtcatcacaacctctgtcagtcaaaaatttatgccggacaagatagcactttcgtcaggaagatggtgttggcgttgcaattttacgaggaggattcagaaaaaagctgattagccagagggaagctcacgcccccctcttgtaaatagctactgtactcgcgccagcgccacggcttgtcctaactgccagaccgccattgcgtaatgggtgctgtggttgtaacgggtgatggtgtagaagttcggcagaccgtaccagtactggtagccggtgccaacatccagacgcagcaggctggcttgttgatggttgcccagcggctgctgtggcgttaaacctgcggcggcaagctgcgaaatgctgtacttagttttgaagccatttggcaagcctggagcctgaccgtttgccattaccgcgacctgatcgcctttcacccagccgtgcgctttgaaatagttcgccacgctaccgatcgcatcaaccggatcccacaggttgatatgcccgtcgccgctgaaatctaccgcatattgtttgtaagacgacggcataaactgtccgtagcccatcgccccggcaaaggaacctttcagattgagcggatcgtcctgctcgtcgcgcgccatcaacaggaaggtttccagctcgccagagaaatactccgcgcggcgtgggtagttaaatgacagcgttgccagcgcatcgaggatgcgagttttccccatcacgcgcccccagcgggtttcaacgccgataatcccgacgataatttccggcggtactccatacacctgccacgcgcgattcaacgcatcttcatactgattccagaaaaccacaccgttctgcacgttgtccggcgtaataaattttttgcgataacggagccatgcgccgttcggacctgatggcggtttcaccgatgtggttggtgcctggttatccatcagccgcagtaccgaatccagacgcttcgcctgggagagaatttcctgcaactgctgacgatcgaaaccgtgtttgttcaccattttgtcgatgaactgctgggcattcgggttattagcgaaatcgccgcccatctgcatcacattgtgctgcggctcaagcaggaagccgccagacggcgttccggtggtcgtatcagtctcagtaggttttggcttgctgctacaggcggcaagcaacacaaaaaggggaagcaatgttacataacgacgcttgaacatgaggggtccatttaacagattcaaccaggggcaagtatggtaaagcatcacgccccgcacaaggaagcggtagtcactgcccgatacggactttacataactcaactcattcccctcgctatccttttattcaaactttcaaattaaaatatttatctttcattttgcgatcaaaataacacttttaaatctttcaatctgattagattaggttgccgtttggtaataaaacaataaatcctgaaggagagaacaatgatagaaaccattactcatggtgcagagtggtttatcgggctgttccaaaagggcggagaggtgtttaccgggatggtgaccggcattcttccgctgttgattagcctgctggttatcatgaacgcactgattaattttatcggtcagcatcgtattgaacgttttgctcaacgttgcgccggtaaccctgtttcccgttacctactgttaccgtgcattggcacgtttgtcttttgcaatccgatgaccctaagcctgggtcgctttatgccggaaaagtacaaacccagctactacgcggcggcctcttatagctgccactcaatgaatggcctcttcccccatatcaaccctggcgaactgtttgtttatcttggcattgccagcggtctgacaacgctgaacctgccacttggcccactggcggtgagttatctgctggttggtctggtcaccaatttcttccgcggctgggtgaccgatctgaccaccgccatttttgagaaaaagatgggcattcaacttgaacaaaaagttcacctggcaggagcaacatcatgacgcatattcggatcgaaaaaggaacgggtggctggggcggcccgcttgagctgaaagccacgccgggaaaaaaaatcgtctatatcaccgccggtacccggcctgcgattgttgacaaactggcacagcttactggctggcaggctattgacggatttaaagaaggtgaacccgcggaggcggaaattggtgtcgcggtaatcgactgtggcggcacattacgctgcggcatctatccgaaacgacgtattcccaccattaatatccactcgacgggcaagtccggtccgctggcgcagtacattgtggaagatatttatgtctctggcgtaaaagaagaaaacatcactgtagtaggtgatgcgacaccacaaccctcttccgtgggccgtgactatgacaccagtaagaaaatcaccgaacaaagcgatggtttactggcgaaggtgggaatgggcatggggtccaccgttgcggtgctgtttcaatctggtcgtgacaccatcgacactgtattaaaaaccattctgccgtttatggcattcgtctcggcgctcattggcatcattatggcttctggccttggtgactggattgcccacggtcttgctccgctggcgagccatccactgggtctggtcatgctggcgctcatctgttccttcccactgctttcacctttcctcggcccaggcgcagttatcgcacaggttatcggcgtattgattggcgtgcagattggtctcggcaatattccgccgcatctggctttaccggcactgtttgccatcaacgcgcaggcggcctgcgacttcatcccggtcggtttgtcgctggcggaagcccgtcaggacacggttcgcgtcggtgtcccttctgtactggtgagccgctttttaaccggcgcgccgactgtactgatcgcctggtttgtctccggttttatctatcaatagaggctgaaacatgaccgttatttatcagaccaccatcacccgtatcggcgcgagtgccattgacgccctcagtgaccagatgctcatcacctttcgtgaaggcgcgcctgcggacctcgaagagtattgcttcattcattgccacggcgagttgaaaggtgcactccatcccggtttgcaattttcactcgggcagcatcgctatccggtgaccgctgttggcagcgtggcggaagacaaccttcgcgaactgggtcatgtcaccctgcgcttcgatggtttaaacgaagcggaatttccgggcactgtccatgtggcaggccctgtccccgacgatatcgcgccgggatcggttttgaagtttgaatctgttaaggagtaaaaaatgaatcaggttgccgttgtcatcggtggtgggcaaaccttaggcgcgttcctgtgccacggtctggctgccgaggggtatcgcgtcgcggttgtcgatattcagagcgacaaagccgcaaatgtggcacaagaaattaacgccgaatatggtgaaagtatggcgtacggttttggtgctgacgccactagcgagcaaagcgttctggcgctctctcgtggggtagatgaaatctttggtcgcgtggatttgctggtctacagcgccggaatagcaaaagcagcctttatcagcgacttccagctcggcgattttgaccgttcgctacaggtgaatctggtgggttatttcctgtgtgcgcgtgaattttcgcgtttgatgatccgcgacgggattcaggggcgcattattcagatcaactcgaaatccggcaaagtgggcagcaaacacaactctggctacagcgcagcgaaatttggtggcgtcgggctgactcaatcactggcgctggatctggcggagtacggcattacggtgcattcactgatgctcggtaacctgctgaaatcgccgatgttccagtcactgttgccacaatacgcgaccaagctgggtatcaaaccggatcaagtcgagcagtattacatcgacaaagtaccgctcaaacgcggctgcgattatcaagatgtgctgaatatgctgctgttctacgccagtcctaaggcgtcgtactgcaccggacagtcgatcaatgtcaccggcggtcaggtgatgttctgatcaacagcggagatccattaaggatctccgtgagactatagaatgcctgatgcgctacgctcatcaggcatacaggacttccgccactacattaaggaaaagttatggtatccgcactcatcaccgtcgccgttatcgcctggtgtgcgcaactggccttaggcggctggcaaatttctcgttttaaccgtgccttcgacacactatgccagcaagggcgggttggcgtgggccgttccagcgggcgctttaaaccgcgggtcgtggtcgccatcgcgctggacgatcagcagcgcatcgtcgacaccttgtttatgaaaggactgaccgtcttcgcccgaccgcaaaaaattcccgcaattaccggtatgcatgcgggtgatttacagcccgatgtgatctttccccatgatccactatcacagaatgctctatcattggcgcttaaactgaaacgtggataatttcgttgtgaatgttacttgcttgcgaagttatcattttgaaacctaaatcaggtaatcacgcccatgaaacctcgtcagcgtcaggccgccattctggagtatctgcaaaagcagggtaaatgctcggttgaagaattggcgcaatactttgacaccacaggcacaaccattcgcaaagatctggtcattctggaacatgccggaaccgtcattcgtacttatggcggagtggtgttgaataaagaggaatccgatccgcctatcgatcataaaacactcatcaacacccacaagaaagagctgattgcagaagctgccgttagttttatccatgatggcgattcgatcattcttgatgctggcagtaccgttttgcagatggttcccctgctctcgcgctttaataacatcacggtgatgaccaacagcctgcatatcgtcaatgcgctatccgaactggataacgaacaaactatcctgatgccaggcggaacgtttcgcaaaaaatcggcctcatttcacgggcaactggcagagaatgccttcgagcatttcaccttcgataaattgtttatgggcaccgacggcatcgatctcaatgcgggcgtaaccacctttaacgaggtttataccgtcagtaaggcaatgtgcaatgccgcgcgcgaagtgattttgatggcggactcatcaaagtttggccgtaaaagccccaacgtagtttgcagtcttgaaagcgtcgataagctgattaccgacgcaggtatcgatccggcgtttcgtcaggcgctggaagagaaagggatcgatgtgatcataaccggagagagcaatgagtgaagcactactgaacgcgggacgtcagacgttaatgctggagttgcaggaagcaagccgtttaccggaacgtctgggcgatgattttgttcgcgccgccaatatcatcctgcactgtgaaggcaaagtggtggtttcgggaattggcaaatcgggccacattggtaagaaaatcgccgcaacgcttgccagtaccggcactccggctttttttgtccatccggcagaagcgctgcacggcgatctggggatgatcgaaagccgcgatgtgatgctgtttatctcttactccggtggcgcgaaggaactggatctgattattccgcgtctggaagataaatctatcgcgctgctggcgatgaccggcaaaccgacgtcaccgctgggcctggcggcaaaagcggtgctggatatctccgtagaacgcgaagcctgcccgatgcaccttgcgccgacctccagcaccgtcaataccctgatgatgggtgacgcgctggcgatggcggtcatgcaggcgcgcggatttaatgaagaagattttgcccgctcccacccagccggggcactgggcgctcgcttgctgaataaagtgcatcatctgatgcgccgtgacgatgccatcccacaggtggcgttaaccgccagcgtgatggatgcgatgctggaactcagccgcaccggtctggggctggtggcggtatgtgacgctcaacaacaggtacaaggcgtctttaccgacggcgatttacgtcgctggctggttggcggcggcgcactcaccacgccagtcaatgaagcgatgacggtcggcggcaccacgttgcaatcgcaaagtcgcgccatcgacgccaaagagatcctgatgaagcgcaaaatcactgccgcaccggtggtggatgaaaacggcaaactcaccggcgcaataaacctgcaggatttctatcaggccgggattatttaatccttcaatcccagacgtttcgccagccgatgcaggttggcgacgtcggtttccagcatccgcgcgcaggcagcccagttgtgatgattttgtgccagtgcctgacgaatagtttcacgctggaacgcttctgtcgcttcacgcaggttttgcttaacaacgggcaccgccgccacttctggcgtcggcaacgtcacctcaggaaaagcaaaatgttgcgcctcaagaatcacttcatcgccgctgcgggtggctctcgccagaactaccgcccgatgaatagcatgttccagttcgcgcacgtttcccggaaaactgtagtgttgcagtaaatttcgcgctccggcacttaataccacgcgggagagcccctgccgcaaacgacactgctcgcagaaataccccgccagcagaatgacatcatcgccccgctcacgcagcggcggcaccgaaagtggaaacacgctcaggcgatgaaacaaatcggcgcggaatcgccctgccagcacctcttcgcgtaaatcgcggttagtcgccgccagcacgcgcacatcgacccgcaaacaacggtcatcgccaacgcgctgaatatcgccatactgcaacaccctcagcagcttggcctgcaatgccaacgacaactcgccgatctcatccagaaacagcgtgccgttatccgccatttcaaacttcccgctgcgattactgatagcgccagtaaacgctcctttcacatgcccgaacaactcactttccgccacactttccggcagtgcagcacagttgagatagaccagcggattcaccgcccgtggcgaggcttcatgaatcgctttcgccaccagctccttaccggttccagtctcaccgctgatcaggacgttgagatcggacgccgccacaatctcaatctcttttttcagttgcgtcatgccaggggacaagccaatcatctgcgtctgtttcaccgcttcaaacggcgtggcatcgcctggcagcatattctggctttccagttgttcaatcagcaacgcattgcttaacgctcccgccgccagcgcagcaatcagccgtagctcttcgtcgctgaaaacatcgaactgatcgggctgcatcccgtcgagcgtcagtgcgccgatcaggttttgcccggcaaacaatggcagaccaacgcaggcgtgaaccttcagactctcctgcccaggaatcaaaccgtcatagggatcgggcaattcgctgtctgcgggaaagcgcaccacatccccggcgcgggcaatcgcttccagccgtggatgcccttccagcgcaaagcgtctaccgagtacatcctttgccagaccgtcgatggcaagcggaataaactgccgcgaatcgtaacgtagcaacgcagacgcatcgcactccagcacctgacgtagcgtggtgatcaggcgctgaaaacgatcctggtgaccaatcccacgctgcaattcgatggcgatattcgccagcacatcaacggaaaaactcatctttgcctcactgtcaatttgactatagatattgtcatatcgaccatttgattgatagtcattttgactactcattaatgggcataattttatttatagagtaaaaacaatcagataaaaaactggcacgcaatctgcaattagcaagacatctttttagaacacgctgaataaattgaggttgctatgtctattgtggtgaaaaataacattcattgggttggtcaacgtgactgggaagtgcgtgattttcacggcacggaatataaaacgctgcgcggcagcagctacaatagctacctcatccgcgaagaaaaaaacgtgctgatcgacaccgtcgaccataaattcagccgcgaatttgtgcagaacctgcgtaatgaaatcgatctggcggatatcgattacatcgtgattaaccatgcagaagaggaccacgctggggcgctgaccgaactgatggcacaaattcccgatacgccgatctactgtacagccaacgctatcgactcgataaatggtcatcaccatcatccggagtggaattttaatgtggtgaaaactggcgacacgctggatatcggcaacggcaaacagctcatttttgtcgaaacaccaatgctgcactggccggacagcatgatgacttacctgacaggcgacgcggtgctgttcagtaacgatgctttcggtcaacactactgcgacgagcatctgttcaacgatgaagtggatcagacggagcttttcgagcagtgccagcgttactacgccaatatcctgacgccgttcagccgcctggtaacaccgaaaattaccgagatcctgggctttaacttaccagtcgatatgatagccacttcccacggcgtggtatggcgcgataacccgacgcaaattgtcgagctgtacctgaaatgggcggctgattatcaggaagacagaatcaccattttctacgacaccatgtcgaataacacccgcatgatggctgacgctatcgcccaggggattgcggaaaccgacccacgcgtggcggtgaaaattttcaacgtcgcccgaagcgataaaaacgaaatcctgactaatgtcttccgctcaaaaggcgtgctggtcggcacttcgacgatgaataacgtgatgatgccgaaaatcgccgggctggtggaggagatgactggtttacgcttccgtaacaaacgcgccagtgctttcggctctcacggctggagcggcggtgcggtggatcgtctttccacgcgcctgcaggatgcgggtttcgaaatgtcgcttagcctgaaagcgaaatggcgaccagaccaggacgctctgaagttatgccgtgaacacggtcgcgaaatcgcccgtcagtgggcgctcgcgccgctgccgcagagcacggtgaatacggtagttaaagaagaaacctctgccaccacgacggctgacctcggcccacggatgcagtgcagcgtctgccagtggatttacgatccggcaaaaggcgagccaatgcaggacgttgcgccaggaacgccgtggagtgaagtcccggataacttcctctgcccggaatgctccctcggcaaagacgtctttgaagaactggcatcggaggcaaaatgagtaacggcattgtgatcatcggttcgggcttcgccgcccgccaactggtgaaaaatattcgcaaacaggacgccactattccattaaccctgattgccgccgacagcatggatgagtacaacaaacctgacctcagccatgttatcagtcaggggcaacgtgccgatgaccttacccgccagacggcgggtgaatttgccgagcagtttaatctgcacctgtttccacaaacctgggtgacggatatcgatgccgaagcccgtgtggtgaaaagccagaataatcagtggcaatacgacaagctagtactggcaaccggtgccagtgcctttgtcccgcctgtgcctgggcgtgagttaatgctgacgttaaatagtcagcaagagtatcgcgcctgtgaaacgcaactgcgggatgcccgacgcgtgttgattgttggcggtggtttgattggtagcgaactggcgatggatttttgtcgtgcaggcaaagcggtcacgctaatcgacaacgctgccagtattctggcgtcgttaatgccaccggaagtaagcagccgcttgcagcatcggttgacggagatgggcgttcatctgctgttgaaatctcagttacaggggctggaaaaaacggattctggcattcaggcaacgctggaccgccagcgcaatatcgaagtggatgcggtaattgccgccaccggactgcgcccggaaaccgccctggcacgacgcgccgggctgacgattaatcgcggcgtttgcgtcgatagttatctgcaaaccagtaataccgatatttacgcgctgggcgattgcgcggaaattaacggtcaggtattgccgttcctccagccgattcaacttagcgcgatggtgctggcaaaaaatcttctcggcaataacacgccgctgaaactcccggcgatgctggtgaaaatcaaaacgccggaattaccgctgcatctggcaggcgaaacccagcgtcaggatttacgctggcaaattaataccgaacgccagggaatggtggcgcgcggcgttgacgatgctgaccagcttcgcgcctttgtggtcagtgaggatcggatgaaagaggcatttggattgttgaaaacattgccgatgtaggtgggctactgtgcctaaaatgtcggatgcgacgctggcgcgtcttatccgacctacggggacgcatgtgtaggccggataaggcgtttacgccgcatccggcaatggtgtccaaatgcaacacgttttatccgttctggacttcacccgctaaccaacgcgccgcagcaataaccccctgccccagagacaaaccgccatcacccgccggtaaactctgtggaaagagcaatgtgaaatcagcgagataatgcgccagacgtgcacgcagcaaacggttatgaataaccccgccgctaaataccagcgtagtgataccacgcatcgtggcctgctcacgcatcaacgcggcaaaaccctgcgccagcgcatcatgaaacgcccacgcgcgttgattaaccggtgcctgccagttcagccactgctgccagaaagtggcgagatccagttgattgtccacccgcggcattgtcaccggatgcgtcactccgtggcatgaggctgcgagcgcctccagagcacaagccgcttcaccttcataacttaacgtggctggcgcacagcccagtgccgccgccactgcatcgaaaaaacgcccacacgatgacgccagcggcgcgttaattccacgctcaatggcccgcgccagcacgctccagttttgctgttgcacacttgctgtttcagagtaattctgccactccggcacaaagcgcaggcactgcgccagcaggtttcgccacggctgcttcgctgccaaatcgccacccggaagcgccactgcaggcaagccgcccaggtgctcacattcgcgatagttcacccgcaggcactcgccgccccacaaagcgccgttctcccccataccgataccgtcgagcgtcaaagcaatgacatcaccgccatccagcggccactgatgctctgccagacacgccgctgcatgggcatgatgatgcagtaccgtttgcgtcggcagattcatttcacgcgcccactggctggagacatagcccggatgcgcgtcatgcacaacgtattgcggggtaaaatcgtagatgttttgcatcaggcgtaacgcttcgcgccactgcatctggatgccatcgtcacttaaatcgcccagatgctgactcaacaccgcttgttcaccgcgcaccaggcagaaggtatttttcagatccgcgccgagacacagcacaggcggaacatttttaaagcccggaggcaaagccagcgcatccggcacatacccccgcgaacggcgcagcatttcgccgctttcgcgcaccaccgaatcatccatccgctgcacgatgtcgcggttatgtatcaagaatccgtcggcaatgccctgcaaatccgccagcgcctgttcgttgctgatagctggtggtttaccgctcaggttgccggaggtcatcaccagcgggcattgcagttcctgtaacagcaaatgctggagcgggttcgcaggcaacattaccccgacttcgttaaggtcaggggcgatatcatcacaaagctcaggaacgtattttttatccaccagcacaatcggcgcggcgggcgtggtaagcaactggcgcgcagcgtctggtaaaccgtcagccactggcaacatgaccgccagcggtttcgccgggcgatgtttgcgcgcccgaagtgtcgccaccgcgttactgttacgtgcatcgcaggcaagatgaaatccgccaatccctttgatggcgacaattttgcccatttttaactgtgcgatagctgcctgtaatgccgcctcttgttccgcatgttcaccatgacttacccattcaagatgcgggccacactccgggcaggccaccggctgggcgtggaagcgacgatcgagcgggtcacggtactctttgtcacaggccggacatagcggaaacgccgccatcacggtaaacgggcggtcgtaaggcatggcgcgaataatggtgaaacgcgggccgcagtgggtacagttgataaacggataacgataacgccgttcgcctggggtattcatttcggcaaggcaagcagggcaagtagcggcatcgggaacaatttgcgtattcatggtgccgcctgtgctctggcgtatagtgaactcggtgggcagttgtgaccagataaacggctcacgctcgacgctatcaatacgcgccagcggcgggcagtgctgatacaattgaacaagaaacgtttccgggtcttcccgcagccggacttctacgccatcgccgtcattacagacatcgccgtgaagatttaattgctgtgccagctgccagacaaacggacgaaaaccgacgccctgcactttgccacgaatacgcagttggacaccgcaagatgtgttttttgccattgagttattcccgccatcatgaattgcgtaacccgccctgccggacacgacagcgtcgcatccggcagtcacaggtcggcgataccgcccgctccgtattctacgaatatttccgggaattcctttgatgccagaacagttctgtaagatttttagaacatcagcgccgtacggcggcgtttttctgcgctcagttgttcaagtttattacgatcgacacaaatcagcgcatgagtcgggcaagccgccatacacgccgggccgtcttcacgatggttgcacaggtcgcatttattggcttcggctttgtcagcccgtacattcagacccgcgccgctgttgcggatcaccggacgtaccaccacttccatcgcaccatacgggcaagccacaacgcaggttttgcaaccaatgcaacgttcctgcatcacatgaacaaaccctttatcacggctgatagcaccattcgggcagacgttagcgcacggtgcatcttcacactgacggcaaactgtcgccgtggaaatgttcacacctttaatgacatggatacgcggtaaaaaagtttccggggtcagcgatgcacagtcctgattttcctgatgagaaaccacgcacgctacttcacaggtacggcaaccaatacatttactcgcgtcagcaatgatgaaacggttcatcaaattctccagcaatgacagttaatgcgccgatacattcacaaatcatgccagtttttaatttactgttatttaaggaaattaatttctgtaatgcaggaaaaacgatgtcatcgacactagtgacgatgacatgtgatgacaatgtttatcgcgaaggagcaatgagtgagtcgcggcggatcagttttccgctgaaggttttcggcggtgagaaatccccgccatcgagcataaaaatcagccgtccaataatttcctgaatcatctcagtcaccggaatttttacgctggagagcgccggaacggtgtagggggcaatagcgatatcatcgaatccgataactgacacctgctctggcaccgctacgccgcgctcgtgtaacgctttcatcgcacctatcgccatatcgtcgttactggcaactaacgcgctaaatttagccccacgttcgagcaacatttctaccccttcggccccgctggcaggcgtccatttaccgttagcgataagtttttcattgagcgcaataccatgctgcgccagcgcgtctttatacccggcaagacgttcaatgctggtgggggaatccatcgagccggtaaggaaagcaatctcctgatgcccggcgtttatcaactctgccacggcgttaaaactggtctgtttatgatcgcaccagacgctatggctgctgtttttgcgcaggcggcgattaagcaccattatcggctgactgtgcgcgtcaatgatgtcatcgatctcatccacgcttaaaaaacgcgggtaaatcatgatcgcgtcgcagcgcagatccagcagatactgaatcgcctggcgctcttcttctgcgctgtgtttaccatctgccaatagcaactgccgccctttctcttccgccattcgcgcggcatgaaagagtaattcactaaaataaatgccgtggtaaagcgtgttggtcactaccagccccagcgtctgagtactcttcgccgacagattgcgcgccagcaagtttggacggtaaccgctctcttctaccgcctgaaacacgcgatctttagtctcctggctgacgtagccattacctgaaagcacgcgggaaacggtcgcttttgaaaccccggcgcgcttcgccacttccagcatcgtcgtcatcattttcatccctttacacgcaatcaacgcagtgtactgcaccgtttgccgattgtccttgcacaatcggcgggaaaaatattcaggtgaccggtttcacaaatataaaaaatgaacaattcactctcttgcttatttagtgacaactattcatgattttgtgaaaccggtttcttaattccgtttcagcatcggcatttttccgtcacgtcgactgataacaactacatctaccctactgataacaggataaaatccgatggccaaaaattatgcggcgctggcacgctcggtgatagcggcactgggcggcgttgataacatctcggcggtcacgcactgtatgacgcggttgcgctttgttatcaaagatgatgcacttatcgacagcccgacgttaaaaaccatccccggcgtgctcggcgtggtacgtagtgacaaccagtgtcaggtgattatcggcaataccgtttcacaagcctttcaggaagtcgtcagcctgctgccgggagatatgcagcccgcacagcccgtgggtaaacccaaactcacgctacgtcgcattggtgcggggatcctcgatgcgctgatcggcaccatgtcaccgctgatcccggcgattatcggcggatcgatggtcaaactgctggcaatgatcctcgagatgagcggcgtgctgacaaaaggatcgccgaccttaaccattctgaatgtgattggtgacggtgctttcttcttcctgccgctgatggtcgcggcatctgccgccatcaaatttaaaaccaatatgtcgctggcgattgccatcgcgggtgtgctggtacatccgagttttattgaactgatggcgaaagcggcccagggtgaacatgtcgaatttgccctgattccggtcaccgcggtgaaatacacctacacggtgatcccggcgctggtgatgacctggtgcctgtcatatatcgaacgctgggtggacagcattacaccggcggtgaccaaaaacttcctcaaaccaatgctgattgtgttgattgccgcaccgctggcaatcctgctgattggcccgattggtatctggatcggtagcgccatttcggcgctggtttacaccattcatggttatctgggctggctttcagtcgccattatgggcgcgctgtggcctctgctggtaatgaccgggatgcaccgcgtctttacgccaaccatcattcagaccattgccgaaaccggcaaagaagggatggtcatgccgtcagagatcggcgctaacctgtcgctgggcggttcatcactggcagtggcgtggaaaacgaaaaacccggaactgcgtcagacggcgctggctgcggcggcatcagccattatggcggggatttccgaaccggcgttatatggcgtggcgatccgcctgaaacgtccgcttatcgccagtcttatcagcggttttatttgcggcgcggttgccggtatggcggggcttgccagccactcaatggcagcgccggggctatttaccagcgtgcagttcttcgatccggcgaatccaatgagcatcgtctgggtgttcgcggtcatggcgctggcggtggtgctgtcgtttatcctcacactgttgctcggctttgaggatattcctgttgaggaagcggctgcccaggcgcgaaagtatcagagcgtacaaccgaccgtcgccaaagaagtaagtcttaattgaggatgaaaatgtcagtatttccagaaagttttttatggggcggcgcgcttgccgccaaccagtctgaaggtgcgttccgtgaaggtgacaaaggtctgaccactgtcgatatgatcccacacggcgagcatcgaatggcggtgaaactggggctggaaaaacgttttcagttgcgagatgacgagttttatcccagccatgaggcgacggatttttatcatcgttataaagaagatatcgccctgatggcagagatgggattcaaggttttccgtacctcaattgcctggagccgtctctttccgcagggcgatgaaatcacgcccaatcagcagggcattgctttttatcgttctgtctttgaagagtgtaaaaagtacggtatcgaaccgctggtcacgttgtgccacttcgatgtgccgatgcatctggtcaccgaatatggctcctggcgtaaccgcaagctggtggagtttttcagccgctacgccagaacctgctttgaagcatttgatggtctggtgaaatactggctaaccttcaatgaaatcaacattatgttgcatagcccgttctccggcgcgggtctggtgtttgaagaaggtgaaaatcaggatcaggtgaaatatcaggccgcgcatcaccagctggttgccagtgcgctagccaccaaaatcgcccatgaggttaacccgcaaaatcaggtgggctgtatgctggcgggcggtaacttctacccttacagttgcaagccggaagatgtctgggcggcgctggagaaagaccgggaaaacctgttttttatcgatgtgcaggcgcggggcacgtatccggcttactctgcccgcgtattccgcgaaaaaggggtaaccatcaacaaagcaccgggcgatgatgaaatcctgaaaaacaccgtcgattttgtctctttcagctattacgcctcgcgctgcgcctcggcggagatgaacgccaacaacagcagtgcggcgaacgtggtgaaatcgctgcgtaatccgtatctacaggtgagcgactggggctggggaattgatccactcggtctgcgtatcaccatgaatatgatgtacgatcgttatcagaagccgctgtttctggtggaaaacggcctgggcgcaaaagatgaatttgctgccaatggcgagattaacgacgactatcgcatcagctacttacgcgaacatatccgcgcaatgggcgaagcgattgcagacggcattccgctgatgggctacaccacatggggctgtattgatttagtttccgcctctacgggtgaaatgagcaaacgctacggctttgtctttgttgaccgtgacgacgcaggcaacggtacgctgacgcgcacgcgtaagaaatcattctggtggtataaaaaagtgattgccagtaatggggaagatttagagtaggtaacagtgccggatgcggcgtgaacgccttatccggcctacatgtcgcacgaaccatgaaggcccgataagcgcagcgcatcgggcaatttagcatttggcatcagagctggttcaccccatcaagaacatccctgtcctgattccttaatgaaaaactactcttcttccaccgctaactgcgcgaagccgccatttccttcccagccttccagtcgttgataaacggtttctaccgcatctttaatcggctgggtcatcgggtagtaaaagccgacgatatccggctgaatgccgaggaaaatcacttcgccaatatcttctttcaactggtcgataaggtaattcaacggcatgttatgggtagtcatcataaacatctcggcgatatcatccgggtcgatgatgcggatctcgccggggtttagccccatatccgtggcgtcgacaatcagcagtcgtgtcgggcgcagttcacggatagcgacgatgtcgttttccggtgcgctaccgccgtcaatcaccacccagttacctttcggcgcggcggcgcacttttccgccagcagcggacctgcgccatcatcgcccatcatgctattgccaacacagagtaaaacgtcagtcacgcagtctcctcaccatcaaatagatggcgttttcctgatgaatatcatgcagcatacttaacagcattgtactccattcctgctgctgcgaagtttgcgctgcccgggctttatcgaatgcgttggccagcatcggcacatggttaatgtcgatgacgatctcaccatatttcggcacgccttccattttgcggcgggcttcactgcctgcctccagagtggcaatccatgccagatattcatcccacgggcaggtgagcgccgcttccaggcaatcgataaccccaaggtggtgaccaatcgccaggctgtaatagaccacctgctgcgcctcggcgggcgtggcatcgttctcatcaataaatttacggctcagttgactgaacaccaccttttcactcatcggatacgcgcctcttcaacaacatgattcagatggctgacaatctcgttcagacgcggatcgttttccgcttccagccagcgtgcaacctgttcttcgccctgccctaactgtgtaaggtaatcatcggcaatctgacgaccgtaacgataacccgccaggcgacgtgcttcgcgatccactttcacgcgcagcggctgcaccatatcaccatgcaggatctccgccggttgttcatccagttcacccggcccacgggcgtgaattttctgctccagcaggccgagcgccattgcaaagccgtacagcgtggcggcaggcgttggcgggcagccagggatataaacatccacagggacaattttatccgtaccgccccacacgcagtagagatcgtggaagatcccgccactgttaccgcaggcaccgtaggagatacaaattttcgggtccggcgcggactgccacgcacgcagcgcaggggatcgcattgcacgggtgaccgcgccggtaaacagtaaaatatccgcatgacgcggtgaaggaacgactttaatgccgaagcgttctgcatcaaacagcggcgaaagcgtggcgaaaatttcgatttcgcaaccgttgcagccgccgcagtccacgcggtaaacataggcagaacgtttgatttttttcagtaacgacgccttcatgctggcgatggattcatccaccgtcatggggaccggaatgccgttggcgtcacgggggcctaataaattgctcatcagatggcctctttcatatggcgagtcagttcaatacggtcggacggcaccaggcatttctggcgcttacattccgggcaagtctcaaagctttcgcggtggttttccgcgcggctgtcgccgttgtgcttaagcagcgcaatggcgtagtcgatctctttctggacggcgaaaggacgattgcagacgcggcagttgcacagcgcgaagcgggactgttgcaggaagtcttctttcttccacaccgccagttcgtactcttgcgacagtttgatcgccgccgtcgggcagacttcttcgcagcgtccacagaagatgcagtgcccaagattaaactcccaggcaagctctcctgtggcgaggtcagtttcaaccgttaaggcgtttgacgggcaggcattgacgcaggccgcgcagccgatgcactgctgcgggttctgctctggcttaccacggaagtttttatcaaccgcaatcggctccagcggataagacgaggtcgccgtgccggttttgatgacttttttgataaaggtaaacatggcgattccttatttcagcggcgagtttttacgctcaatgctgtaacgctcgagttctttgtacggcaccactttgctcttcttcttacgcacatcgaccacggtcatgcggtcggtacaggagtagcaagggtcgaggctaccgataatcagcggcgcatcggaaacggtgttgccgcgcagcatgtagcgcagggtcggccagttcgcgtaggtcgcggcacggcagcgccagcggtacagcttctggttgtcgccggtcatgctccagtggatatcatcgccgcgcggcgcttcggcaaagcccagcgcaaagcggtgcggaatgtaggtaaagccttccaccatcagtgggccacccggcaggttatccagaccgtagtcgatcatgttcagcgcggtatagacttcgttgatacgcactttcagacgggaaataacgtcgcagccctgctcgctgtggacttccattggcagcaggccatagccgacaaacgggtgatcggcgcgggtatcacgggcgtgaccgctggcacggaccatcgggccgacgttactgaagtcgcgagcgatttccgggtccagacgaccaatgccgacagtgcgctgttccatgttcggagtgctcagcagcacatccaccagctcctgcacttcacgacgcatctgttgtgccagctggcgggtctggatcatgtcgtctttcagcagatcgcgacgaatcccgccgatcaagttcaggccgtaggttttacgcgcaccggtaaggatctctgccattttcatggaggtttcacgcacgcggaagaactgcataaagccggagtcgaagccggtaaagtgacaggccaggccaaggttgagcagatgcgagtgcaagcgttctacctccagcagaatggcgcggatcatctgcgcacgttctggcacctgaatacccatcgcgttttccaccgacgtggtgtaggcggtgctgtgggcaaagccgcagatcccgcacacacggtcagagaggaaggtcacttcgttataacccatacgggtttccgccagtttttccatgccgcgatggacgtagaacagacggtagtcggcgtcgataatgttttcgccatcgacgaacagacggaagtggcccggttcatcagaagtgacgtgcagcggaccaatcggcacgacgttgtttttcttgtcgcccagttcgttgatgaactcgtaggtttcagcatcggtggtcggtgccggacgctgacgataatccatgctgtctttacgcagcggataaagttcatccggccagtcatccggcagcaccagacgacgttcatccggcagaccaaccggaatcaaaccgtacatatcgcgcacttcacgctcgccccacaccgccgccggaacgcgcggcgtcacggacggatattccggtttgttggcgtcaacttcgacgcgaaccgtaatccaacacttagtgcccttctccatcgacagcacgtagtaaacggcgtaatgaccattcagtttgcgttcgtcgttaccaaacagcaccgacagccagccaccctgtttgtagtaaagaaactccaccacttccggcaggtagttcacctttacggtgacagtcagctgatctttggtctgccaggcgtggtccagcacgacgcccggaaatgcctcattcagcgcggcgagataatgttgacctaatttttcttcagacatgctcaaactctctttaatcacgccgccagcaaggagacgaacgctaaaaatgcaaagccaaacccagcccaggtaatgcgcggagtaatatcaagacgcagacgggccatgctgttttcgaacagcgcgataaccaggacgccgaccaccagttttacgatggcaatcaccagcgccagcagcagtccaccggcggtgaaggtttccatttgtccccacggaataaacaccccgacgaacatctgcaacaccaccagctgtttcaggctgataccccatttcatgacgccaaagccgctgccgctgtattcagagagcgggccttcctgcagctcctgctcggcttccgccaggtcgaacggcagtttgcccatttcgataaaggtggcgaacgcacaggcacaaagcgccagtaccagcgggatgctctggctcagcggccagtgataaacggtgtcggtgatgttgctgatgttggtggaaccggcaacctgtgcggcaacccacagaccaagcagcagcatcggttcgaccagcacgccaagcatcgcttcacggctcgcgccgatagcggtaaacgggctaccggtatccagaccagaaatggcaaagaagaaacgcgcgatggcaaagagatacagtaaggtgatcaaatcacccagttgcggcagcggagaaccgacggtcaccaccggcagcgcagtagcgatagtcagcatgacgcccaccatcacatacggcgtcaggcggaacacccagccggaggcatccgggccgacgctctgacgccccagcagtttgataatgtcgcgatactcctgcaacacgcccggcccgcgacggttatgcaagcgggcgcgcgccacgcgggttataccggagagcagcggcgcaacggcaaataacaccagcgcctgaattaacggatataaaacactcattctcaggctcctcgtgaaacaataatcaccaccagtaccgccagttcaaccagcgccatccggcggaacagcaacgcactcccctcgcactgccagcccggcaccagagacaccggattcagccatttgcgtagtttcagcaccggcgcaaacgcctgtttcaccggcatggcaaaaccgtgagcggtaatcaccattgatttttcgtggtcgtaaccgcacacccaggccgcaccgcgggaacgcgatggcaaacgatcgcctttgcaaatcgccataatgatgaatggcagcagcgggcaggcaatcagcagcaacgtgatcatcggttgagaaacggtggtgttagcaggctccagcggcagaggtacagcagcagagagcatcggcagtagccacggcgcagcaacaccgccaattacgcagcaaatcgccagtgccactacgcttacgctcatcaggagcggcgcacaggtggcgttttcggcttctttggtgcgcggcgcgccgaggaacgtgacgccatagactttcgccatacacatcaccgccagcgcaccggtaattgccagccccacagcgagcagcggccccagcagacgggcaacaaacgcgccactattgctcagtttgaaaaatgattgatagataacccattccccggcaaaaccattcagcggcggcagcgcagccattgccatcagcccgactaacatggcgatggagataaccggcattttcttgccaataccaccgagtttttcgatatcgcgatgaccggtacggaaccagacgctccccgccccgaggaacagtacgcttttgaacaggctatggttaagcagatggtacagaccaccgaccaggccaagagcaatcagcgccggttgttcgagcgcgatacccgttacgccagcgcccagccccagcaggatgatgccgatattttccagggtgtggtaagccagcaggcgctggatgttgtgctccaccagcgcatacagaccaccgacaaacgcggtgatcatgccgagcaccagcagcgcgatcccccaccacagcggtgcattaccgcccagcagtgacagggttaaaatgcccagcaggccaattttcatgactaccgtagaaaacaacgcggcagctggcgcagaggcgttcgcatgtgcctgcggcacccagccgtgcagcggaataatcccggccagcaggccaaagccaatcactccgagcagccagatatcggaaccgagcggcagctgttgcatacgcatatccagcaggcgcagatccagcgtgccgtaacgctgccacagcagccagcaagcaatcgccagcagcagagtgccaagacgccccagcgcaaaccacagtttgccctctttgctgttgctggtgaggaacaccgcgcacagggccatgatttcggccattaccacgaacatgccgaggttgctggcaatgacggcgcagacggcggcagccatcaacatattgatctgcaagccgttgcacttcacctgcgcgtggcgatgccagtcaatgttgtagaggctgacaaacagaccgcacagaccgagcgtaatcagccaaatcgcgttaagcggagagatttgcacatcgtagcttaccagcgacagcgcaccgctcacgccaaccgcgccagtcagtacagtgaagcccgcggctgccgtatacagactaccaaccgcgccgccaattccagctatccagccacttaacgctttttgaaaagaaaagagaaatgccagaacagcggcggcgacaaaccacgccacgccgctattgatcagggaaattgcgctcatttagcctctccactttgagcctgctgaaacaaggtgagatcgccaaagtccgtgttaaaggtcagctcacgcttacgtttgctgacgcgggcgatatcggtgttatccaccagatgcagggctttagtcgggcacatccgcacgcaggccggaccttgttcatcaaagctacaaaggtcacatttgacggcgatcgcgcgaatacctggcacccagtcaagcaatgtgctgacacgcgccggagcaggcggtgccggtggcgctttcggggtattggcgtttgccggaatatccagcggacggctgccggaaaattcaattgcgccaaacgggcaggcgatgccgcacagcttgcagcttacgcacaggctttcattcaactgcacggccccatcgacgcgggtgatggcgttaaccgggcagaccaccgcgcagggtgcatcttcacagtggtgacagagctgcggcgcagattctttttcattcagcatcactctcaggcgcggcattgattgcaggccgtgctggcgatgcgtctctgaacaggcggcctcacaagtgtggcagccgatacagagcgtggagtcagcaattacaaaacgattcaccaggcattcctcaggtgattgtcatttttgacgaaaacatgccgatgaaatgtcattttcgacactcatcgacacgcccatccccaaacaggcgtaacgcctgcaaaacgggcaaagcctcagctcatgctgccgggctttgtccctttaccagttggcttaaattcaccggcacattgttttcaatagcggtgtataagctgtcgtaaacgccagcgattttttcgagatagtgttccagaacctgttcgcgatcgcggatgttgaccttgccatcaatcatgccgtcaatgctcagttgcgcctgcgcaatccgctgtttgtcttcgccatcttttgtttcgacgtaatactcgatggtgtggctgttaaagccatccgccagggtgacgtaaatgcgaaaatgttcaaaaaggacgaaacagagttctttgtccggcgcgcagctcatggcgtgatgcaggcgcgctttcgataacgtgatcccctgaaccagcgaattgcagtagatgtgccactggtcctgtaggcgacgatgccgctgtgcgatgtaatcggctttctcgcttatttcccaaatagtcattgtcaggttacccgtttaacagagatgccagctttaagcattttttgtgccaacttttaatttattgttattaaagagatttttaagctaaagatgaatttcgtcgccgtgtcgacgtgtcatttcgacatcatcgacattattcaccgcagggataatcaacactggcacaattattgcttgtagctggcaatagttaatgggaggcgatatgcacgaaataaccctctgccaacgggcactggaattgatcgaacagcaggccgcaaaacacggcgcaaaacgcgtaactggggtctggctcaaaattggcgcattttcttgtgtcgaaaccagctctcttgccttttgttttgatctggtttgccgcggcagcgtggcggaaggttgtaaactgcacctcgaagaacaagaggccgaatgctggtgtgaaacatgccaacagtatgtgacgctactgacccagcgcgtccgccgctgtccacagtgtcatggtgacatgctgcagattgtggcagacgacggtttacagattcggcggatagaaatagaccaggagtgagcgatgtgtacaacatgcggttgcggtgaaggcaacctgtatatcgagggtgatgaacataaccctcattccgcgtttcgtagcgcgccatttgccccggcggcacgcccgaagatgaaaatcaccggcattaaagcgcctgaatttacccccagccagactgaagaaggcgacctgcattacggtcatggcgaagcgggcactcacgcaccgggcatgagccagcgtcggatgctggaagtcgaaattgacgtgctggacaaaaataaccgtctggctgaacgcaaccgcgcgcgctttgctgcccgcaagcaactggtgctcaacctggtttccagccctggttccggtaaaaccaccctgctgacggaaaccctaatgcgcctgaaagacagcgttccgtgcgcagttattgaaggcgaccagcaaaccgtgaacgatgccgcacgcattcgcgctaccggcacaccagcgattcaggtgaacaccggtaaaggctgccatcttgacgcacagatgattgccgacgccgcaccgcgtctgccactggacgataacggtattctgtttatcgaaaacgttggcaacctcgtatgcccggccagcttcgatctcggtgaaaaacacaaagtggcggtgctttccgttaccgaaggtgaagacaaaccactgaaatatccgcatatgtttgccgccgcctcgctgatgctgctcaacaaagttgacctgttgccgtatctcaactttgacgttgaaaagtgcatcgcctgcgcccgcgaagtcaatccagaaattgaaatcatccttatttccgccaccagcggcgaagggatggaccagtggctgaactggctggagacacagcgatgtgcataggcgttcccggccagatccgcaccattgacggcaaccaggcgaaagtcgacgtctgcggcattcagcgcgatgtcgatttaacgttagtcggcagctgcgatgaaaacggtcagccgcgcgtgggccagtgggtactggtacacgttggctttgccatgagcgtaattaatgaagccgaagcacgcgacactctcgacgccttacaaaacatgtttgacgttgagccggatgtcggcgcgctgttgtatggcgaggaaaaataatgcgttttgttgatgaatatcgcgcgccggaacaggtgatgcagttaattgagcatctgcgcgaacgtgcttcacatctctcttacaccgccgaacgccctctgcggattatggaagtgtgtggcggtcatacccacgctatctttaaattcggcctcgaccagttactgccggaaaacgttgagtttatccacggtccggggtgcccggtgtgcgtactgccgatgggtagaatcgacacctgcgtggagattgccagccatccggaagtcatcttctgtacctttggcgacgccatgcgcgtgccggggaaacagggatcgctgttgcaggcaaaagcacgcggtgccgatgtgcgcatcgtttactcgccgatggatgcgttgaaactggcgcaggagaatccaacccgcaaagtggtgttcttcggcttaggttttgaaaccactatgccgaccaccgctatcactctgcaacaggcgaaagcgcgtgatgtgcagaatttttacttcttctgccagcacattacgcttatcccgacgttgcgcagtttgctggaacagccggataacggtatcgatgcgttcctcgcgccgggtcacgtcagtatggttatcggcaccgacgcctataattttatcgccagcgattttcatcgtccgctggtggttgctggattcgaaccccttgatctactacaaggcgtggtcatgctggtgcagcagaaaatagcggcccacagcaaggtagagaatcagtatcgtcgagtggtaccggatgccggtaacctgctggcgcaacaggcgattgccgatgtgttctgtgtcaacggcgacagcgaatggcgcggcttaggcgtgattgaatcttctggcgtgcacctgacgccggattatcaacgattcgatgccgaagcacatttccgcccggcaccgcagcaggtctgcgatgacccgcgcgcgcgttgtggtgaggtattaacgggcaaatgtaagccgcatcaatgcccgctgtttggtaacacctgtaatcctcaaaccgcgtttggtgcgctgatggtttcctccgaaggagcgtgcgccgcgtggtatcagtatcgtcagcaggagagtgaagcgtgaataatatccaactcgcccacggtagcggcggccaggcgatgcagcaattaatcaacagcctgtttatggaagcctttgccaacccgtggctggcagagcaggaagatcaggcacgtcttgatctggcgcagctggtagcggaaggcgaccgtctggcgttctccaccgacagttacgttattgacccgctgttcttccctggcggtaatatcggcaagctggcgatttgcggcacagccaatgacgttgcggtcagtggcgctattccgcgctatctctcctgtggctttatcctcgaagaaggattgccgatggagacactgaaagccgtagtgaccagcatggcagaaaccgcccgcgcggcaggcattgccatcgttactggcgatactaaagtggtgcagcgcggcgcggtagataaactgtttatcaacaccgctggcatgggcgcaattccggcgaatattcactggggcgcacagacgctaaccgcaggcgatgtattgctggtgagcggtacactcggcgaccacggggcgactatccttaacctgcgtgagcagctggggctggatggcgaactggtcagcgactgcgcggtgctgacgccgcttattcagacgctgcgtgacattcccggcgtgaaagcgctgcgtgatgccacccgtggtggtgtaaacgcggtggttcatgagttcgcggcagcctgcggttgtggtattgaactttcagaagcggcactgcctgttaaacctgccgtgcgtggcgtttgcgaattgctgggactggacgccctgaactttgccaacgaaggcaaactagtaatagctgttgaacgcaacgcggcagagcaagtgctggcagcgttacattcccatccactggggaaagacgcggcgctgattggtgaagtggtggaacgtaaaggtgttcgtcttgccggtctgtatggcgtgaaacgaaccctcgatttaccacacgccgaaccgcttccgcgtatatgctaataaaattctaaatctcctatagttagtcaatgaccttttgcaccgctttgcggtgctttcctggaagaacaaaatgtcatatacaccgatgagtgatctcggacaacaagggttgttcgacatcactcggacactattgcagcagcccgatctggcctcgctgtgtgaggctctttcgcaactggtaaagcgttctgcgctcgccgacaacgcggctattgtgttgtggcaagcgcagactcaacgtgcgtcttattacgcgtcgcgtgaaaaagacacccccattaaatatgaagacgaaactgttctggcacacggtccggtacgcagcattttgtcgcgccctgatacgctgcattgcagttacgaagaattttgtgaaacctggccgcagctggacgcaggtgggctatacccaaaatttggtcactattgcctgatgccactggcggcggaagggcatatttttggtggctgtgaatttattcgttatgacgatcgcccctggagcgaaaaagagttcaatcgtctgcaaacatttacgcagatcgtttctgtcgtcaccgaacaaatccagagccgcgtcgttaacaatgtcgactatgagttgttatgccgggaacgcgataacttccgcatcctggtcgccatcaccaacgcggtgctttcccgcctggatatggacgaactggtcagcgaagtcgccaaagaaatccattactatttcgacattgacgatatcagtatcgtcttacgcagccaccgtaaaaacaaactcaacatctactccactcactatcttgataaacagcatcccgcccacgaacagagcgaagtcgatgaagccggaaccctcaccgaacgcgtgttcaaaagtaaagagatgctgctgatcaatctccacgagcgggacgatttagccccctatgaacgcatgttgttcgacacctggggcaaccagattcaaaccttgtgcctgttaccgctgatgtctggcgacaccatgctgggcgtgctgaaactggcgcaatgcgaagagaaagtgtttaccactaccaatctgaatttactgcgccagattgccgaacgtgtggcaatcgctgtcgataacgccctcgcctatcaggaaatccatcgtctgaaagaacggctggttgatgaaaacctcgccctgaccgagcagctcaacaatgttgatagtgaatttggcgagattattggccgcagcgaagccatgtacagcgtgcttaaacaagttgaaatggtggcgcaaagtgacagtaccgtgctgatcctcggtgaaactggcacgggtaaagagctgattgcccgtgcgatccataatctcagtgggcgtaataatcgccgcatggtcaaaatgaactgcgcggcgatgcctgccggattgctggaaagcgatctgtttggtcatgagcgtggggcttttaccggtgccagcgcccagcgtatcggtcgttttgaactggcggataaaagctccctgttcctcgacgaagtgggcgatatgccactggagttacagccgaagttgctgcgtgtattgcaggaacaggagtttgaacgtctcggcagcaacaaaatcattcagacggacgtgcgtctaatcgccgcgactaaccgcgatctgaaaaaaatggtcgccgaccgtgagttccgtagcgatctctattaccgcctgaacgtattcccgattcacctgccgccactacgcgagcgtccggaagatattccgctgctggcgaaagcctttaccttcaaaattgcccgtcgtctggggcgcaatatcgacagcattcctgccgagacgctgcgcaccttgagcaacatggagtggccgggtaacgtacgcgaactggaaaacgtcattgagcgcgcggtattgctaacacgcggtaacgtgctgcagctgtcattgccagatattgttttaccggaacctgaaacgccgcctgccgcaacggttgtcgccctggagggcgaagatgaatatcagttgattgtgcgcgtgctgaaagaaaccaacggcgtggttgccgggcctaaaggcgctgcgcaacgtctggggctgaaacgcacgaccctgctgtcacggatgaagcggctgggaattgataaatcggcattgatttaactgcaaattgccggacagatctgcctgtccggcatactattcatgaggttttttcggacgatatttttccggcagttctggcaccggacgcttgtcatcgatgagatgacgcacggttaagatcggatgacgccacagcattctcggcccggcccaacgcataatctgtttcatctcttcacgctttgcaggctggtaacagtgcaccggacactgcttacaggctggtttctcttcgccgaacacacatttatccagccgcttttgcgcgtaaacaaacaacgcctcgtaatgctccggctccgctgacgcctgcgggcatttcgcttgataaagatcgatcatttttttaatcgtcagtttttcacgagagatacgcttgccggacatgctgcctccacctcattaagatgtatttatattacatcttaatcttaaagggcactatgactccaaagaagaagggttagccaaccgatacaattttgcgtacttgcttcataagcatcacgcaaaagctgcaaaacagcatctttcccggaaccagcatcaagaactcgccgttcgcttcttcccctgaaatgattaactccggtatcatgtgcgccttatgtgattacaacgaaaataaaaaccatcacaccccatttaatatcagggaaccggacataaccccatgagtgcaatagaaaatttcgacgcccatacgcccatgatgcagcagtatctcaggctgaaagcccagcatcccgagatcctgctgttttaccggatgggtgatttttatgaactgttttatgacgacgcaaaacgcgcgtcgcaactgctggatatttcactgaccaaacgcggtgcttcggcgggagagccgatcccgatggcggggattccctaccatgcggtggaaaactatctcgccaaactggtgaatcagggagagtccgttgccatctgcgaacaaattggcgatccggcgaccagcaaaggtccggttgagcgcaaagttgtgcgtatcgttacgccaggcaccatcagcgatgaagccctgttgcaggagcgtcaggacaacctgctggcggctatctggcaggacagcaaaggtttcggctacgcgacgctggatatcagttccgggcgttttcgcctgagcgaaccggctgaccgcgaaacgatggcggcagaactgcaacgcactaatcctgcggaactgctgtatgcagaagattttgctgaaatgtcgttaattgaaggccgtcgcggcctgcgccgtcgcccgctgtgggagtttgaaatcgacaccgcgcgccagcagttgaatctgcaatttgggacccgcgatctggtcggttttggcgtcgagaacgcgccgcgcggactttgtgctgccggttgtctgttgcagtatgcgaaagatacccaacgtacgactctgccgcatattcgttccatcaccatggaacgtgagcaggacagcatcattatggatgccgcgacgcgtcgtaatctggaaatcacccagaacctggcgggtggtgcggaaaatacgctggcttctgtgctcgactgcaccgtcacgccgatgggcagccgtatgctgaaacgctggctgcatatgccagtgcgcgatacccgcgtgttgcttgagcgccagcaaactattggcgcattgcaggatttcaccgccgggctacagccggtactgcgtcaggtcggcgacctggaacgtattctggcacgtctggctttacgaactgctcgcccacgcgatctggcccgtatgcgccacgctttccagcaactgccggagctgcgtgcgcagttagaaactgtcgatagtgcaccggtacaggcgctacgtgagaagatgggcgagtttgccgagctgcgcgatctgctggagcgagcaatcatcgacacaccgccggtgctggtacgcgacggtggtgttatcgcatcgggctataacgaagagctggatgagtggcgcgcgctggctgacggcgcgaccgattatctggagcgtctggaagtccgcgagcgtgaacgtaccggcctggacacgctgaaagttggctttaatgcggtgcacggctactacattcaaatcagccgtgggcaaagccatctggcacccatcaactacatgcgtcgccagacgctgaaaaacgccgagcgctacatcattccagagctaaaagagtacgaagataaagttctcacctcaaaaggcaaagcactggcactggaaaaacagctttatgaagagctgttcgacctgctgttgccgcatctggaagcgttgcaacagagcgcgagcgcgctggcggaactcgacgtgctggttaacctggcggaacgggcctataccctgaactacacctgcccgaccttcattgataaaccgggcattcgcattaccgaaggtcgccatccggtagttgaacaagtactgaatgagccatttatcgccaacccgctgaatctgtcgccgcagcgccgcatgttgatcatcaccggtccgaacatgggcggtaaaagtacctatatgcgccagaccgcactgattgcgctgatggcctacatcggcagctatgtaccggcacaaaaagtcgagattggacctatcgatcgcatctttacccgcgtaggcgcggcagatgacctggcgtccgggcgctcaacctttatggtggagatgactgaaaccgccaatattttacataacgccaccgaatacagtctggtgttaatggatgagatcgggcgtggaacgtccacctacgatggtctgtcgctggcgtgggcgtgcgcggaaaatctggcgaataagattaaggcattgacgttatttgctacccactatttcgagctgacccagttaccggagaaaatggaaggcgtcgctaacgtgcatctcgatgcactggagcacggcgacaccattgcctttatgcacagcgtgcaggatggcgcggcgagcaaaagctacggcctggcggttgcagctctggcaggcgtgccaaaagaggttattaagcgcgcacggcaaaagctgcgtgagctggaaagcatttcgccgaacgccgccgctacgcaagtggatggtacgcaaatgtctttgctgtcagtaccagaagaaacttcgcctgcggtcgaagctctggaaaatcttgatccggattcactcaccccgcgtcaggcgctggagtggatttatcgcttgaagagcctggtgtaataacaattcccgatagtcttttgctatcgggaatattaacgacaactgacgaataaaataaaaacaccctgtataataggaaagcttattttacagggtaaaaccatgccatctacacgctatcaaaaaatcaatgcccatcactatcgccatatatgggtcgttggtgatattcatggtgaatatcagttattacaatcccgcttacatcaactctcttttttccccaaaatcgacttacttatttctgtcggcgataatattgatcgtggaccggagagtcttgacgtcctgcgcctgctaaaccaaccctggtttacgtcggttaaaggcaaccacgaagcgatggcgcttgaggcattcgaaactggcgatggcaatatgtggcttgccagcggtggtgactggtttttcgatttaaatgattcagagcaacaagaggcaatagatctgttgctgaaattccatcaccttccacatattattgaaatcactaacgacaacataaaatatgccatcgcacatgcagattatccggggagtgaatatctctttggtaaagaaatagcggagagcgaattactctggcctgttgatcgtgtgcagaaatcgcttaatggcgagttacaacaaataaacggcgctgattattttatatttggacatatgatgtttgataacattcagacgttcgctaaccagatttatattgataccggatcgccgaacagcgggcggctgtcattttataaaataaagtagtctcatgcttcttctgtgaagcatgagtaacccggtgttattgcaggccattattcatttttcgctaccagcaaagagagatcctgcttcaccagcgcgcgactggcactctccggcaaaccgtcgtctgtaataatctgatcaaactcgcttaatggtaacgccagccatgtcgccacctgaccatatttcgtcgcatcacagaccaaaactcgctggcggctggcactggcaatcgcccgtttcaccgtgactttatcttccgctggcgtagaaatcccccgcacactccatgacgatgcagaaataaaagcctgatcaatcatcaggctgcgcagcatggtcgcagcggcttccccgacacaggaacggttttcccgacacactgcaccgccagtgtgaataattgtgcaattactgttgtcgagcaagtagtccgcaataacgaaatcgtttgtgaccacagtcagtgactccatgtgaatcagatgctgtgctatcgctaacgtggtcgttcccgcatccagatagatacaacttcccggctgaacaagacttgccgccagcttgccaatagccgctttttgcgtcattgccagcgcagtttttacctgatgagaaggttcatgcgccacgcgtcccggagactggacgcctccggacaccagcacaacggctccctgctgctccagtttttgtaaatcccgacgaatggtcatatgtgacacattcattctgtccgttagttcagcaatactgacaatgcctttttcagctaccatctcaaggatgatttggcgacgctctacgggtatcaacttttgctccttcctttgtcctgctgacattctacgctatttgcctgcgaaacgtgcgcggcgcaactaacgcttagttcacataaaataacacacaatgttaatttatgtgaatcagatcaccataccgttatcttccagcgcttatattcacaatatcaaacaaaatatcacttaaattaacaaggagagcagatgaaaacgggatctgagtttcatgtcggtatcgttggcttagggtcaatgggaatgggagcagcactgtcatatgtccgcgcaggtctttctacctggggcgcagacctgaacagcaatgcctgcgctacgttgaaagaggcaggtgcttgcggggtttctgataacgccgcgacgtttgccgaaaaactggacgcactgctggtgctggtggtcaatgcggcccaggttaaacaggtgctgtttggtgaaacaggcgttgcacaacatctgaaacccggtacggcagtaatggtttcttccactatcgctagtgctgatgcgcaagaaattgctaccgctctggctggattcgatctggaaatgctggatgcgccagtttctggtggtgcagtaaaagccgctaacggtgaaatgactgtcatggcctccggtagcgatattgcctttgaacgactggcacccgtgctggaagccgttgccggaaaagtttatcgcataggtgcagaaccgggactaggttcgaccgtaaaaattattcaccagttgttagcgggcgtacatattgctgccggagccgaagcgatggcacttgcagcccgtgcggggatcccgctggatgtgatgtatgacgtcgtgaccaatgccgccggaaattcctggatgttcgaaaaccggatgcgtcatgtggtggatggcgattacaccccgcattcagccgtcgatatttttgttaaggatcttggtctggttgccgatacagccaaagccctgcacttcccgctgccattggcctcaacagcattgaatatgttcaccagcgccagtaacgcgggttacgggaaagaagacgatagcgcagttatcaagattttctctggcatcactctaccgggagcgaaatcatgatcaagattggcgttatcgccgatgattttaccggcgcgacggatatcgccagttttctggtggaaaacggtctaccaacggtacaaattaacggtgttccaacaggtaaaatgccggaagcaatcgacgcactggtgatcagcctgaaaacgcgctcctgtccagtggttgaagccacacagcaatcgctggcggctctgagctggttgcaacagcaaggttgcaaacagatctatttcaaatactgctctactttcgacagtacggcgaaaggtaatattggcccggttaccgatgccttaatggatgctctcgacacgccgtttacggtcttctctccggccctgccggtcaacggacgtacggtttatcaggggtatttgttcgtaatgaatcaactgctggccgaatccgggatgcgccatcacccggtaaatcccatgaccgacagctatcttccccgtctggttgaagcgcaatccacagggcgctgcggcgtcgtttcggcacatgttttcgaacaaggtgtggatgccgttcgtcaagagctggctcgcttacagcaagagggctaccgctacgcggtgcttgatgcgctgaccgaacaccatctggaaattcagggagaagccttgcgcgatgccccactggtaacgggcggttctggtctggcgattggcctggcccggcagtgggcgcaagaaaacggtaaccaggctcgcaaagcagggcgtccgctcgctgggcgcggcgtagtgctctccggttcatgctctcaaatgaccaaccgccaggtagcacattaccgtcaaattgcaccagcccgtgaagttgatgtggcacgctgcctctcaattgaaactctggccgcttatgcacacgaactggcagagtgggttctgggccaggaaagtgtacttgctccactggtttttgccaccgccagcactgacgcattggcagcaattcaacagcaatacggtgcacaaaaagccagtcaggcagtagaaacactgttttctcaactagcggcgcggttagcagcggaaggcgtgacacgctttattgtcgcaggcggtgagacctccggcgtagtcacacagagcctgggaataaaagggtttcatattggcccaaccatttccccggcgtgccgtgggtaaacgcactggataagcctgtctcactcgcccttaaatctggcaacttcggtgatgacgcctttttttcacgagcccaaagagagtttttatcatgagcgatttcgcaaaagtagagcagtctttgcgagaggagatgacgcggattgccagttcattctttcagcgcggctatgcaaccggttcggctggcaatctgtcgctgcttttacctgacgggaatttactggcgacaccgacaggttcatgcctgggcaatctcgatccgcagcggttttccaaagtcgccgcggatggcgaatggttaagtggtgacaaaccctcgaaagaggtgctctttcatctggcgctgtatcgcaacaatccgcgctgtaaagcggtggtgcatttgcacagcacatggtcgacggcgctttcctgcctgcaagggctggacagcagcaacgttattcgtccgttcacaccatacgtggtgatgcggatgggaaatgtcccgctggtgccttattaccgaccgggcgataaacgcatcgcacaggatctggcggaactggcagcagacaatcaggcttttttactggcaaatcatggcccagtggtttgcggtgaaagcctgcaagaagccgccaacaatatggaagagctggaggaaacggcaaagctgatttttattctcggtgaccgcccgatccgttatctgaccgcaggtgaaattgcggaattaaggagttaatgcaatgcctcgttttgcagctaatttatccatgatgttcaccgaagtgccttttattgaacgcttcgccgcagcgcgaaaagccgggttcgatgctgtggaatttctgtttccctataactactccaccctgcaaatccaaaagcaactggagcaaaaccatctgacactggcgctgttcaataccgctcccggagatattaatgcgggggaatggggattatccgcccttcccggacgtgagcacgaagcacacgcagacatcgacctggcactggaatatgcattggcgctcaattgtgaacaagtccatgtgatggcaggcgtcgtgcccgctggcgaagatgctgaacggtaccgggcagtatttatcgataatatccgctacgctgccgaccgctttgcgccacacggcaagcgaatattagttgaagcactcagccccggcgttaagcctcattatctcttctccagccagtatcaggcactggctattgttgaagaggttgcgcgagataacgtgtttattcaactagatacttttcatgcgcaaaaagtagatggcaacctgacgcatttaatccgcgactacgccgggaaatatgcgcacgtacaaattgccggactacctgatcgacatgaaccggacgatggagaaatcaactatccgtggctgttccgcctgttcgatgaggtgggatatcagggctggatcggttgtgaatataaacctcgtggcctcaccgaagaagggcttggctggtttgacgcctggcgctaattcgttaaatccctaattacaacgtacccatacatccccccatctacggatggggtaggttaactataactttcagacagggtttcccatgtccacaattacattgttatgcattgcgttagctggcgtaatcatgctgttgctgctggtcatcaaggcaaaggtacaaccattcgttgctttgctcctcgtcagcctgttagtcgcacttgcggcaggtataccggcgggcgaagtgggtaaagtgatgatcgccgggatgggcggtgtgcttggttccgtcactattattattggtctgggcgctatgctggggcgtatgatcgaacactctggtggtgcagagtcactggctaattatttcagtcgcaagttaggtgacaaacgaactatcgctgcgctgactctggcagcgttcttcctcggtattcccgtcttctttgatgtcggctttattattcttgcgccaatcatttacggttttgccaaggttgccaaaatatcgccactcaaatttggcctgcctgtcgctgggatcatgctcactgttcacgtggcggtaccgccgcatccaggccctgtcgccgcagcggggttactccacgcagacatcggctggctaaccatcatcggtattgcgatttctattcccgtaggggttgttggctactttgcagcgaaaataatcaataagcgccaatatgcgatgtcagtagaagtactggaacagatgcaactggctccggccagtgaggaaggcgcgacaaaattaagcgataaaataaatccaccgggcgtcgcgctggtcacctcgctaattgttattcctatcgcgattatcatggcgggtacggtttccgcaacactgatgccgccttcgcatcccctgcttggtacgctacagctgatcggctcaccaatggtagctctaatgattgcgctggtgctggcattctggttattggctttacgtcgcggctggagcttacaacacaccagcgacattatgggctcagcgcttcctactgcggcggtagtgattttggttactggtgctggaggggtatttggcaaagtgctggtggaatcgggcgtcggcaaagcccttgccaacatgctacaaatgattgacctgcctctgttaccagccgcatttattatttcactggcgctgcgtgcatcgcaggggtcagcaaccgtagcaatactgacaaccggcgggttactctcagaagcggtgatgggattgaatccgattcagtgcgtattggtgacgctggcagcctgctttggtgggcttggtgcgtcacatattaatgactcagggttctggattgtgaccaaatatctggggttgtcggtagcagacggtctgaaaacctggacagtgttaacgaccattctcggttttaccggattcttaattacctggtgcgtatgggcggtaatttgaccttaataaaaaggtccgatgggcatcggaccttttattgtgcacagaaaaggccagcctcgcttgagactggcctttctgacagatgcttacttactcgcggaacagcgcttcgatattcagcccctgcgtttgcaggatttcgcgcaaacggcgcaggccttcaacctgaatctggcgaacacgttcacgggtgaggccaatttcacgacctacatcttccagtgttgccgcttcgtaccccagcaaaccgaatcgacgtgccagcacttcacgctgtttggcgttcagctcgaacagccatttgacgatgctctgcttcatatcgtcatcttgcgtggtatcttccggaccgttctctttttcatcggccaggatgtccagcaacgctttttcggaatcaccacccagcggggtgtctaccgaggtaatgcgctcgttaagacgaagcatacggctgacgtcatcaactggcttatccagttgctctgcgatctcttccgcacttggttcatggtccagcttatgggacaactcacgtgcggttcgcaggtaaacgttcagctcctttacgatgtgaatcggcaaacgaatagtacgggtttggttcataatcgcccgttcaatcgtctggcgaatccaccaggttgcgtatgttgagaagcggaaaccacgttccgggtcaaacttctctaccgcgcggatcagccccaggttgccctcttcgataaggtccagcaacgccagaccacgattgccataacggcgggcaatttttaccaccagacgcaagttactctcgatcatccggcggcgagaggcgacatctccacgcagtgcgcgacgcgcaaaataaacttcttcttcggccgttaacagtggtgaataaccaatctcaccaaggtaaagctgagtcgcgtccaacacacgctgtgtggctccctgcgataacagttcctcttcggccaaatcgttatcactgggttcctgttctactaaggccttttcgtcaaaaacctcaactccgttctcatcaaattccgcatcttcatttaaatcatgaactttcagcgtattctgactcataaggtggctcctacccgtgatcccttgacggaacattcaagcaaaagcctggttccgccgatttatcgctgcggcaaataacgcagcgggtttacggatttccccttgtaacgaatttcaaaatgcaagcgtgttgaactggttccggtgctacccatggtcgctattttttgccccgccttaacttcttgttgttcccggaccagcattgtgtcgttatgggcgtaggcactcaggtaatcatcattatgtttgatgataatcagattaccgtagccgcgcagcgcgttaccagcataaacaacgcggccatctgcggtcgcgataattgcctgtcctttgctgcctgcgatatcaatccccttgttgcccccctcagaagcgccaaaggtttcgatcactttgccctcagtcggccagcgccaggtggagataggcgtactggttgatgtactgctgacagtcggctcggttgtgcttgctgttggtaccgttacaggcgctgtgaccgtggtcgcagttggcttgttgttcggcaacattttgttagcactctgttcacccgaagactcagaatacgtaattgtcggttgcgacgcaacagcaacggtggaattttgtgcaggcttgatcacaactccttgctctgctgcgtcggcctgggtaatggcatttccgccagtgattggcgtaccggaagcattacccacctgcaaggtctgaccaacgttcagcgcgtatggtgcctgaatattgttgcgctgagcaaggtcacggaaatcgttgccagtaatccaggcgatatagaaaagtgtgtcgccttttttcacggtataggtactgccgctataactgcctttcggaatgttcccatactgacggttatagacgatgcgtccgttttccatctgtaccggctgctgagctactggctgcactggctggatttgcggttgttgagtagcctgaatttgtggctgctgcaccggctgaatttgcggttgctgcgctgtagacgtcgtccccattttcggcggcggcgtaatcaacataccagaattagtatttgcaggcgcattgccattaacggagctgaccggtgccggtggatttgaagtgtcagaacagcctgccagccatagcgaaaccagtgacaaagccgcaatgcggcgaacggtgaattttgggcttcccgcgctcatttatcccccaggaaaaattggttaataaccagtgacataattaccgtgcaaggcaccctactgaacactggaaaagatgttcacgatacgctgacctgcggcaaaataaccaggaaaaatccaggtatttcctcacgttttaagccagctcacccttcactaaagggacaaagcgcacggcctccacggtatcgataataaattcgcctccccgacgacgcacccgtttcaaatactggtgctcctcccctacgggtaagacgagaatcccgccttcgtccagctgcgtcattagcgcagttggaatttccggcggtgccgccgtaacaatgatagcgtcaaacggcgcacgtgcctgccaaccttgccatccatcgccatgacgggttgaaacattatgtaaatcaagatttttcaggcggcgacgtgcctgccactgcaagcctttaatccgttcaaccgagcaaacatgctggacaagatgcgccaggattgccgtttgatatcccgaaccggtgccaatttccagcacccgcgactgcggcgtcagctcgagtaattcggtcattcgcgccaccatatatggctgcgaaattgtctgcccctgacctatcggcaaagcgatattgtcccaggctttttgttcaaacgcttcatcaacgaatttttcacgcggcacggcggcaagtgcattcagcacctgctcatcctgaataccttgcgcacgtaattgatccagaagtgcttgtacgcgtctgcttaccattgcgtgccaactcccacgctgtttaaccagtctgaaaccacatcttgcgcgctatgcgcagttaaatccacatgcagcggcgtgatggagacatagccctcatctaccgcagcaaaatcggtccccggaccagcatcacatttaccgcccggcgggccaatccagtacagcgtattgccgcgcggatcttgctgcgggatcacctgatctgccggatgtcgtgtaccgcagcgcgtcacgcgaatacctttgatttgatccaagggtaaatccggaacgttaatattaagaatacgcccggtgcgcagcggctctttacacagtgcgcgcaaaattgaacaggttaccgccgcggcagtgtcgtaatgtttatgcccgtcaagcgagacggcaagcgccggaaaacctaaatgacggccttccatcgcggcggctaccgtaccggaataaataacatcatcccccagattcggcccggcgttaattccggacacaacaatgtccgggcgcggacgcatcagagcattcacgccaagatagacgcaatcggtcggggttcccatttgcacagcaatatcaccattttcaaaggtaaacgtgcgcagggaggattccagtgtcagagaatttgaagcgccgctgcggttacgatcgggggcgaccacctgaacgtcagcaaactcacgcaaggctttcgccagcgtttgtataccgggtgcatgtaccccgtcatcattactcagcaatatgcgcataatcacctgttgtgttgataagttccctgacaacgctggttgcaaaactacccgccggaagccagaaacggatctctacggtgacgtcatcccaccaattccagcttaattgttgcggatacagcagcatcgctctgcgcgcggcttcaactttttcgcgcaccagtaaagcttgtaattcagtttctgcggcgacagctgcttgttcgaatgccagcgcttcacgctgagttccccattcgccactgcctggcaatgcggcggttatcatcaactctttatcgttgacgcgacgctgtaattccgccagttcttcggtggttgcgacaaaccagctaccacgtccggctaattgtagcgcatcgccgtcaacaacttgattaacgtctgcttttttgaggcgctcagcaacaatctgattaaacaacgcactgcgggctgccgacaaccaaaaactccgtttattgcgatcgcgcaccggagtattggtttgcgcccagcgctgcgccccctgcaagttgctaccgccaatcccaaaacgttgggcaccgaagtagttcggtacaccttttacgcaaatatcgatcagacgttgttcaacgtcatcgcgattgctcacttcgcgcagaaccagggtaaaggcgttacctttcagcgcgcctaaacgcagcttgcgcttgtgccgcgcatactccagcacctggcagccttccagttgaaaggcgctcagatcgggcatttccttgcccggcacgcgagcgcataaccactgttccgtaacagcatgtttgtctttttgcccagcgaagctgacttcacgggcatgaattttcaggaatttcgccagtgcatccgccacaaaacgggtattgcagccgtttttgaggattctaaccagaatatgctcaccttcaccatcaggctcaaagcccaaatcttccaccaccacaaagtcttccggattggctttcagcagcccggtgccttgcggtttaccgtggaggtaagtgagattatcaaactcaatcattttgttgccttaatgagtagcgccaccgcttcacaggcaatcccttccccacgtccggtaaatcccagtttttccgtagtagtggctttcacgttaacatcatccatatggcagccgagatcttcggcaataaacacgcgcatttgtggaatgtgcggcaacatcttcggtgcctgagcgatgatagtgacatcgacgttgccaagggtataacccttcgcctgaatacgacgccaggcttcgcgtagcagctcgcggctatcggcacctttaaatgccggatcggtatccgggaacagcttgccgatatcccccagcgccgccgcgccaagcaatgcatcggtcaacgcatggagcgccacgtcgccatcagaatgcgccagcaatcctttttcgtaaggaatgcgtacgccaccaatgataattgggccttcaccgccaaaggcatgtacgtcaaaaccgtgtccaattcgcattatgtattctcctgatggatggttcgggtgaggtaaaactcggccagtgccaaatcttccgggcgcgtgactttaatgttatccgcacggccttcgaccaactgaggatggaatccgcaatattccagcgccgaggcttcgtcggtaatagtcgcgccttcatttagagcgcgcgtcagacagtcatgtaacagctcacgagggaaaaattgcggcgtcagcgcgtgccataagccgttgcgatcaacggtatgagcaatggcatttttgcccggttcggcacgtttcatagtatcgcgcactggtgcggcgaggatcccccccgtgcggctggtttcgctcaacgccaacaatcgcgcgaggtcatcctgatgcaaacaaggacgagcggcgtcatgcaccaatacccactgcgcgtcgccagcggctttcagacctgccagcacggaatcggcacgctcatcaccgccatctacaacggtgatttgcggatgattcgccagaggaagttgtgcaaaacggctatcgccaggacttatggcaatgacgacacgtttcacccggggatgcgccagcagcgcatgcaccgagtgttcaagaatggtttgattaccgattgagagatattgcttaggacattccgtttgcattcgacggccaaatccggccgccggaaccacggcgcaaacatccaaatgagtggttgccatgttaattcccgggctgatttatcgattgttttgccccgcagactgtgcgcgcttcgacgcgtcaggcaccagacgataaaaagtttcgcccggcctggtcatgctgagttcattacgcgcacgctcttcgagcgcctcctggccgccattgagatcgtcaatttcggcaaaaagttgatcgtttcgcgctttaagtttcgcgtttgtagcttgctgtgccgccacatcatcattgacgcgggtatagtcatgtataccgttcttaccgaaccacagcgaatactgtagccagaccagaatagccagcaacagcagcgttagtttacccatcctgccccctgaaaaacggcatcatcatcccatgcatccgaagacgactctacatcctctgttggggataccgcgacaacgcgggcaaatgtaccacatttgtccattgttacgtatacccagggcgtgcagaacataatctcattattagttacggtttgaattatgaacagaggagacgggaaagtacaaattagcccagtagccacataaacagtgcgccaaacataatgcctactgtcaccagggtgaaaacaatactgtagcgtagctttccgtccatcaatgaatgcagcgcaatccccaccactaccgcgacgggcatcagcgccagaaagaaaggccaggtgtagataaagaagaacagcgtgttagagccataaatcaacatcggcatcgccagcgcaaataaccaggagataaaaccgaccacggcaccaggcagtgaccatgtggtttcttcatcctcagtaaggctgtcgttatttgttagtgtaatgttatggctattacgcatatttgatcctgttactttgacgaaccgggcatggaaacccggtggtgtctcaggatctgataatatcgttctgtctcaacagatctaataattgctgtaccaaatttgttactaattgttcaccattgagatgaatttctgccgattcaggcgcttcgtaaacggaatctattcccgtaaagttgcgcagttcaccggcacgcgctttcttatataagcctttgggatcgcgggcttcgcaaatcgccagcggcgtatcgacaaacacttcgataaagcgcccttctcctacgcgttcgcgaaccatctggcgttcggcgcggtgtggcgagataaatgcggtcagcaccaccagtccggcttcaaccatcaaattcgccacttcaccgacgcgacggatattctctttacgatcggcatcgctaaaaccgagatcgctgcataatccgtggcgaacattgtcgccatccagcagatacgtactgacgccgagtttatgtaacgcctcctccagcgccccggcgaccgttgatttaccggacccggagaggccggtaaaccacagcactacaccacgatgaccgtggtgtagctcgcgttgttgcacagtgaccggatggctatgccagacgacgttttcgtcatgcagcgccattatttatcccccagcaaatcgcgcgcgccccagtgcggaaagtggcgacgaaccagagcattcaattccagttcgaatgcactgaattcagatggcgcagcagttgcctggctaactggctcgtgcaccataccggcacccacggtcacattgctcaggcgatcgataaaaatcagcccacccgtcaccggattttgttgataacgatctaacaccagcggctcgtcaaaagtgagatccacgaggccgatcccattcagtggcaggttttcaacttcacgctgggtaaggttattaatatcaacctgatagcgaatgccatcaacacgcgcgcgcgtcttcttaccggcaattttgatgtcgtaactctgccctggagaaagcggctgttccgccatccataccacatccaccgacgcgctctgcaccgccggtaacgcttcgtctgccgccagcagcagatcgccacggctgatgtcgatctcatccgtcagcaccagggtgatcgcttctccggcaaaggcttcttcgcgatcaccatcaaaagtcacgatccgcgcgacgtttgattccacaccagagggcagcactttgacacgttgcccgacttccacgcgaccggatgccagcgttccggcgtaaccacgaaaatcgagattcgggcgattaacgtactgcaccgggaagcgcattggctgagcatccaccactcgctggatctccacggtttccagcacttcgagcagtgtcggaccgctgtaccacggcatactttcactttgcgatgccacgttgtcgccttccagtgcagagagcggcacaaagcggatatccagattacccggcagctgcccggcaaaggtcaaataatcttcacgaatacgggtgaacgtctcttcactgtaatccaccagatccattttgttgatcgccacgaccagatgtttgatccccaacagtgtggagataaaactgtgacgacgggtttgatcgagcacgcctttacgggcatcgatcagtaagatcgccagttcacatgtcgatgcgccagtcgccatattgcgggtgtactgctcgtgccctggggtgtcggcgataataaatttacgcttctcggtagagaaatagcggtaggccacgtcaatggtgatgccctgttcgcgctcagcttgcaggccgtccaccagcagagccagatccagcttttcgccctgggtgccgtgacgcttactgtcgttatgcagcgatgagagctgatcttcgtagatttggcgggtatcgtgcagcagacgaccaatcagagtacttttgccgtcatcgacgctaccacaggtcagaaaacgcagcaggcttttatgttgttgcgcaatcatccaggcttcgacgccgccttcattggcgatttgttgtgcaagtgcggtgttcatcttaaaaatacccctgacgttttttcagctccatagaccccgcctggtcgcggtcaatcacgcggccctgacgttcactggtggtggaaaccagcatctcttcgatgatttccggcagtgtttgtgcatttgactccaccgcaccggtcagcggccagcagcccagcgtacggaaacgcaccatccgttttttaatcacttcgcccggttgcaggtcgatacggttgtcatcaatcatcatcaacataccgtcgcgttccagaaccggacgttccgcagcgagatatagcggaacaatgtcgatattttccagccagatgtattgccagatatcctgctcggtccagttagagagcgggaagacgcggatgctttcgcctttgttaatttgcccgttgtagttgtgccacagctccgggcgctgatttttcggatcccagcgatggaagcggtcacggaaagagtaaattcgctctttagcgcgggatttctcttcgtcacggcgcgcaccaccgaaggcggcatcaaaaccgtatttgttcagcgcctgtttcaggccttcagttttcataatatcggtatgtttcgcgctgccgtgcacgaatggattaatccccatcgccacgccttccgggtttttatgcaccagcagttcgcagccgtaggctttagcagtacgatcgcggaactcatacatctcgcggaatttccagccggtatcgacatgcagcaacgggaaaggcagcgtacctggataaaacgccttgcgcgccagatgcagcatgacgctggaatctttaccgatagagtagagcatcaccggatttgagaattctgccgccacctcgcgaataatgtggatgctttccgcctccagttgccgcaggtgagtaagtcgtatttgatccataaccgttcctttgcaataccgctattttcttgccatcagatgtttcgactatagggagcgtaagagaacgaatgaaattaccaattagaatgagtagttccttaacggaataacgatttggcaaagctaatatcaaaaagtgcttaaggcaccggatttcgggcgtttaggaagatttgaaattgttttagcgcagcggcagtttcatactatggcggtaaaaaaatttgcatggtatttaaggactcactatgttttccgcattgcgccaccgtaccgctgccctggcgctcggcgtatgctttattctccccgtacacgcctcgtcacctaaacctggcgattttgctaatactcaggcacgacatattgctactttctttccgggacgcatgaccggaactcctgcagaaatgttatctgccgattatattcgccaacagtttcagcaaatgggttatcgcagtgatattcggacatttaatagtcggtatatttataccgcccgcgataatcgtaagagctggcataacgtgacgggaagtacggtgattgccgctcatgaaggcaaagcgccgcagcagatcatcattatggcgcatctggatacttacgccccgctgagcgatgctgacgccgatgccaatctcggcgggctgacgttacaaggaatggatgataacgccgcaggtttaggtgtcatgctggaattggcagaacgcctgaaaaatacgcctaccgagtatggtattcgatttgtggcgaccagcggcgaagaggaagggaaattaggcgctgagaatttactcaagcggatgagtgacaccgaaaagaaaaatacgctgctggtgattaatctcgataacttaattgttggcgataaattgtatttcaacagcggtgtaaaaacccctgaggcagtaaggaaattaacgcgcgacagggcgctggcaattgcgcgcagtcacggaatagccgcaacgaccaatccgggtttgaataaaaattatccgaaaggcactgggtgttgtaatgacgcagaaatattcgacaaagcgggcattgctgtactttcggtggaagcgactaactggaatcttgggaataaggatggttatcagcaacgcgcaaaaacacctgccttcccggcgggaaatagctggcatgacgtaagactggataatcaccaacatattgataaggctcttcctggaagaatagaacgtcgctgccgtgacgttatgcggataatgctacctctggtgaaggagttggcgaaggcgtcttgatgggtttgaaaatgggagctgggagttctaccgcagaggcgggggaactccaagtgatatccatcatcgcatccagtgcgcccggtttatccccgctgatgcggggaacaccagcgtcaggcgtgaaatctcaccgtcgttgccggtttatccctgctggcgcggggaactctcggttcaggcgttgcaaacctggctaccgggcggtttatccccgctaacgcggggaactcgtagtccatcattccacctatgtctgaactcccggtttatccccgctggcgcggggaactcccgggggataatgtttacggtcatgcgccccccggtttatccccgctggcgcggggaactctgggcggcttgccttgcagccagctccagcagcggtttatccccgctggcgcggggaactcaagctggctggcaatctctttcggggtgagtccggtttatcctcgctggcgcggggaactctagtttccgtatctccggatttataaagctgacggtttatccccgctggcgcggggaactcgcaggcggcgacgcgcagggtatgcgcgattcgcggtttatccccgctggcgcggggaactcgcgaccgctcagaaattccagacccgatccaaacggtttatccccgctggcgcggggaactctcaacattatcaattacaaccgacagggagcccggtttatccccgctggcgcggggaactcagcgtgttcggcatcacctttggcttcggctgcggtttatccccgctggcgcggggaactctgcgtgagcgtatcgccgcgcgtctgcgaaagcggtttatccccgctggcgcggggaactctctaaaagtatacatttgttcttaaagcattttttcccataaaaacaacccaccaaccttaatgtaacatttccttattattaaagatcagctaattctttgttttcaaacaggtaaaaaagacaccaaccttaaaccatccaaatctaccggggtacgcctgtttaacccaaatgtctggaactcaaatcccgtttccgtattcgttgcccatgccatcactacattgccttcttccgccagtccagctatttgttcccagatcatttcacgaatttttgcggatacatcacctacatatacccctgcacgtacctccaacaaccagatggctaatctgcctcgtaagcgcggaggtacattttcagtgaccacgaccaacatactcatttcagctactccgatggcctgcatctcccagtgaaacaggaagcggaatggcaacaggctgtgcatcttcaggtggggccggcggttgtatttctccagcggcaagcacgtcctctataagcggaatcaatttggctaatgttttactactgcgaaaaatatccctgcacgccaaacggacttcccggtccggctcaccagggttacgacgcgctatctcaaaagctttcggtacaacagtgtcaaatttaatgatgtctgcaatatcgtaaacaaaggaaagaggctttcctgtatgcacaaacccaatagctggtgcataaccagctgcaagtatcgccgcttcagttacgccgtataaacaggaagttgcagcgctaatgcattggttgatcgtatcgcccttttcccagtctttcggatcgtagcgacgtccattccatgtcacgccgtattgcttcgccagaagtgcgtaggttgcccgcacgcgactgccttctatacctctgagttgctctacggagcgccgggcaggcgcaggttctccaaaccgaagttcaaacattttacgtacgaccttcagacgcaaatcttcatccagagcaagttttgcctgatagagcagcttatctgaacgcgcacctccaggctgaccagaagcataaacacgaacgcccgcttcccccacccataccaacaatgttccaacttgcgcagccaggcgtacagctgcatgcgaaacccgtgtaccaggttccagcatgatgcaggcaaccgagccaacaggaatatgagtgcggatccctgtcttgtcgataagtacaaacgcgccatctattacatcgatctgcccatattgcagaaagatcatggagacgcgatctttgagtggaatgggattaaggggaagccaggtcattttattacacctcaatcacagtggagccaaagatagcaagccacatcccatcgatttagctggcccaataccttgctgtacaagatctattaacgctggcgcgtcgttgatggtgagcacaccttcaaagcaaaccgtttggatctttccacttttaccatcaccagaaaaatactgtggccgttccgatatgggatgcacatcttcaacgcgcgccgcattgcccaatttacgttgcaaccacgcgatttgttctgcttcttttattaacggaacccgacagcgtttaatattccctttactgtccaggcgcttttgattgtcgagaatagttttgatcggatttgcccgaagccgaaaatagagtggaacaccaacctgaagttgaaattcaacctgtttagttttaatgactgtcgcaacggcagttgaaacaggcatttgcgctgactgcaataaaacatgacagccttctggtgtgtttcgcttctcaacatgaaaaagaaaatcacgagcagcatccggtctgtttggaaataaatgccataatccctggtgaagttggtaaagatccctgctccaggccctggcaatgatgactttactgagatacatccatacctcctttaatcacataccattctcgggaagcaaattgtcgaggcaaggtgatcatcggttcgtcgcgcgccgtaaattttaaatgatgccctgtaactgattcctcactatatatatcgccgccaacgggctcataatttaatagcgccttctgaggatccgatgcctgacatgtccccaaaaaaagcgggtgtgttagtgggcaacttctccgccccaggtaaggtgtataccgaggctttaatactgctttttcaagttctgagataaccatcgttgcatggggtgttaaccagagagcgacggtaaaggaggcatcacataaatattcgcgccatgtttgaatcgtttcatgacttttcaaaccacggtaatcttctcgcgctccaaggactgtatggtaatcacgcaaccccgttacagacacacgacgatcgtcaagaatgagttcatcgcagcgcactgcaaattgcacactctctgataacgcctgtaatgaagaagtatcatcacgttggatcccaagacaagccccgagtagccctaataacccgcttcgggtcggaaatcttccggtaggtcgcgttccttcaaaggtcggctgcccccaggcttgcattggcccagcaagccgcaagatcaaataagatctcatgttcacgcctcgccattattacgaacccaggattttaactgttctaaagtaggcatttgtttaacttgagcagtaattgggtctacatcagataagctgaattgcgcagcagctccgttcagaccatatccattggcaacgcgatcccaatattgattaaacgcctgtatagacggttgcaaaaagccatctttcgctttaaccgctttttcaaaagcatttgccatagaaagtggcatatcggagaaattaaccattaccatatccgcagggttaaaagcggcataagtacgctgttttgctccagggacctctgttgccagcatatgaacaacatgggttgcaatttccagagcctgctccctggaggcaccacctaaattttcctgaagttgagcgaggttaatgttggcataacgataaaaaacacccgatgaaaattcctgagttcccagatgtgcagaaccttgttcctgtaaatcatctacagcggtgaaccagtcaatatcagaatcaacctgatgagtagtgatcgcatgcgcaatggacattgcaccatcaacttttcccaactcagtcatcatgccgctggttgccattcttccactaagcgcaatatcaacaccctgctgtaaattcacacgtatggcggcaatatcttccttaagaactttgagcagctttttatcatccagattatcagcctctgcttttgcaacctgctcacagaaccaggctatttctcccacaacccagggagtaaccgcatcggcagaaatcttttcggcttcatcaactgatttaccggagagcagcgctaatgtcttatcgatgattttttggtcaaaacgttcaccaagtttttgccgaagaacatcacgtaattgtgcaagatgaatggttctgagactggattcaccaatattttgtgcgtaataaccacttttacgcatcgcacgtttaaggctttgacttgaaattcttactcgtcttttgccgccgaaaatagcgtctttctgcatgttcatatcgtcgcggttcagacatgaagggctgtgagagatcagaacatgaatattgataaagttagacatagaaaggtttccttacgcatttttgtttgtggtcaatacaaaatcttccagaagttgctggcgttcgcgctttccccaccaggtcaacatcctggccattaatggccagtcaagtacgggttcggcgtgagtaagtaatcgacgtaactggaccatatcggctgttctgtcagcccgaattaattgaaagatacggcgctcgttaattcttccactattggctaaagctcttcccaacgagatacctgttgtttgctccgattttttgtcctgatgtcggatgacattctttcctgcgctcaggcaaaacaccatgcgcaaaagagcctgctggtgacgtgggttttcccaaccaaaaggttgcaccagcctataaaacgcagggatatcgcgtaattcatcaggttctgaaacacgtctaatttgcgcacatgatccattatccagttgttgccaggctcgatataaagccattgcatcaatttcatcagccatttgatggccctccttgcggttttaactcccgtaaatgtttgtatagcgtggcgcgggcaagcgctaatgtgcttattaatttaggatgatgtgcatagggagctacagattgattaaatagcatttcacacaattgatgaagtttgtctcgtaaatcagctattacctcatcagcctgggaaaaattaacattcgccagtacatcgggaattaataattcactctgtcgatagaaatgcctttctgcagtctcatgaacagagactccggcccctttgaagtctttatttttaaacccttctgcaaaggtatataacgccttgcgtaaggctgttttatatcccaaaccaacagtcactatttcgtttatcacattgccgtattgttgccacccctgattaaacatcaacacatcatgacgccgttcaagaatagatgcttgattattacgatatccccccataatcaattcaagaggactttgcggcgcaatatttctgaattgattcacaaccgccgccacgcgatttccattttcattttgaataatcttatctaccacaactcggctgatttgtgtccatgatggtgcggaggtggtgaaagcaagaaatttttcctcaacctcccctttcttgactgttaccagacaaggggaatgcggatggggccatagcccattaactgtaaaggtaaatttttccttaagaaaaccggtataacgcaaattgctttcctgtccacagcaagaacatttaccaatcccaatgggatcgcataattcaatatgcgctggttgccagaatagaccacggacaaacccaattgacgaagcaggtatagactcattggacttgataggtttaatccaggtaggttggttttccgtatgtgattcattaggaaattgtttttgaagacgaggtaatgtgaggacattgagtaacaccgttgaacgaagatcgatcccacgtacgaacgttgttacaggtgttcctccacgtaaaccgcttttaaaaccaccaccaaaacctggtgcctgattcgcctggttgaataacgcaatcgcagtgcatccaccacataatgcttcaccctgccccggttgattgacaaatgcacaattcgtcgcgccgcttaccccagccaacagtttttccattggagtcacatcatttgctttgacacctttggtctgcataaagggatgttctgcgtgattaaggtagaacatatctatccacggcgcgatgagttgttgaaactcatcttcagtgagcggattcattatgcgatgtcgaaattcaacgtcatcttttgccggggcgataatttgcccaatgcaaaccagcagtgctaaagcggccagttccatatcgtcacggggcaaacttaatcgccactgatctctactgcagtatagcgattgcagatttatgatttggactttccccccgtttcgcgggcgtacagggatccagttatcaataagcaaattcatttgttctccttcatatgctccgacatttctcctgcatttctatacgtcggcacacttccgttatcggtaaaaacaaagaaaaaatacggcgtaattaattcaataatcacattcactgcaaaaatatattcattggtttaatacaattaacctatacatatattaagatgtgttgaattgtttaaagacaataatgcatgcatttcaaatctgcaagttattcgttttattattaaagaaacttttagttataataattaccatgaattttattacataaaatattcatactgtgaatataaaatctcataccgggaaattaaaagaagatgtacattgtgcaccttccctacttaagtagggataaaccgttattggtcttattatcgtcattgataacaatcattcccgaagttatttgggatttgcagggatgactctggtcatcccttcatcccctgtataggtaataacaatactgttaccctgccagacccatccatccagattctgtttcccttccagccaaagtaacccatcttcatctactacttcagaaaaactacgtttccaggtgaagggtacattgacgcgattaagtgcaagcgcctcatactgctgttcatgacttaggtcctcgtagacctggccatcgagcagttgtttacctgaagacgtttgtacataaggcaataatggcaggctcatttccccatccctcgttaccgcaagaatggtttcatcgttatcctgcaagctatattcttcagcccactgcaggaccttgcgagccttgaaccttttttcacactcggcgctttcaaatttatccatgccattgccgacccattctggctcatccatttccgcatcatcgtaaatgctatccagccattgccggtaagcatcagggaaaaataaggatgctccattaagctcctcaatatgttgctgcgtccgccacatgactctaacgttgctataaatatgctcatgtcgtccgtaaccctcgccatcaggcagcaaaatggtggcaacaggaatctcaaaaccagcgggacgatatttgcgatgatggcgatgtaaacggcccaatcgttggaaaagcaaatctgcaggacaatgctgagtaattaaccaatcaaaatcaacgtcgagtgattgttccacgacctgggttgcgacaagtatccgtccaacatttcgcttcccatttttgccgaaattgctaataactcgattctctttttcacgacgatcgttcagcgtaaagcgcgcatgaaacaaatctatatctacttgcgtgttatttagctcctttagccgttggtagcatacttgtgcaacgtcaaccaaattgcaaataagacagacctgtgcacccgcgtttgccgctgcgatcattcgctctaacatcgtaaggtcaggtaacatgtcagctaaacaaataggttctggctgaatcgaaaagcggggcgggagttgttctggatgagctagcagatcaaaacgttgcgcaccattcacacctcgccagttaatgagtggatatgcggagttattttccactggatctgtatgcagaccataagtatccagaagtttctgtttttgtttcattggtagggttgcggaaagaagaataacactccctcccacatcagcctgagccttgagcactgcctccagcaagccgttcatataggtgtcgtaagcatgaacttcatcaacaattaaaacacttcgaccaattcccaaaccacggataaagcggtgtttaactggcaataccgatatcaacacctgatcaatcgtgcaaacgccgatttgcccaagaaacactttcttattgctttgtgacaaccactgacaacactgaacccacgcttcttcttgcccctgttcagtaatcgcgcgtgattttattgattgaaagaggtggttaaaccgtgaattgccatgagcaagaataagatttggggatgaaaataagtggctcgcgctcgcttccattctcgtaagcatagcattcgcggtagcttgtgttgggagggcaaaaataacactatccgcaatttgttgatcaataagtttccaagcataggccagcgctgtttccgttttaccggagcctgtaggtgcctctattaccgtcagcccgggagctactggaagagcatcaactaacacctgtaattgtctgggttgatagccattgtccagtagtgcatgaacaccttcataacatcgcttatttgatacaagtccactcaactccaatacccggctcgcatcctgctgtcggtcctggaaatacgttctcagagcatttatgtcggaaggcgcatcctcattaaacagaaaggtattcgttgtagtccaggagcctaaccagtcagcaagcgagcaaaaacctgctaacagtgatgaacaatcaggtggtatatcgtttatagataaccccgctggcgttaaaaataatgcttccagtacagatatccactcctcacgagcctgtttatcttgcgcagcataagatgccagagaagctggcatttcccaacgcgacttatcttgatcctgggaatgtaatataaaaccatgatgtcctgtaacggcctctacccatggaaaccaggactcataaggatgaggagcggcatcaaaaaaactgaaaaaatccccgagagattgctctgaaagtgaatcctggttaaaccaatacagaccggctgcaccatgattaaatttacggcacatttgtgttgatggaccattaagtgatggcgttgcaggatttaatttcagccaactttctgctgatttatattggaatcgtatatcaaactttccaatatcatgaagagcaatgaaaaataacagccaggccttcaccctctgttttgatagcatttcatttcggcaaaaagtattttgcagtacgactgattgatcccaccagcaatctgcaacagcagcaacatcaaggcaatgataaattaacagatgaatatcatttcctttcgtcaagctttttgaggattttccccagtaatggcatatatatttaaaaggttccattaatagcctccctgtttttttagtattatcgatgatatcagcgggctatttttcgatgctgctcataaatatcgaattacagtgatatacacatgtcttgcctccctgcaaagaagagactaacattcgaattgtttgggttcgaacgctggcctcaggttgatagaaatatcgcctggggcttttgtccatctggaacctcgcgaatgcttaacgccagacagcctcaagcacccgacgccattctatacctgataattcttcccgcggcgttcacgtttaaaatcaggaatgctgctcgcaaaataaaaacgcccccatcatttctgacagaggcgtttaatttgtccggcaatatttacccttcgtgtaacccacattccctttttaagccaaagaaacgcgtttcttcttccgccatgccgggttcccatttacgggttgtatgggtatcgcccaccgataaatatccttcatcccataatgggtgatatttcaggccatgtttttgcaggtactgataaatagttcggttatcccagtcgataatcggcagcactttaaatacgccacgctgaattgccagcaccggtaaattggcacgactgccggattgttcacggcgcaggccagcaaaccaggtttgcgcattcagttctttcagagcccggttcatcggttcgactttgttgatgtcattgtacttttcaatgccttcaacgccctgctcccacagttttccgtagcgtgcttcctgccaggctgcgctttcggtagcacggtacactttcaggttgagcttgagtttgtccgttaactcgtcaataaagcggtaggtttccgggaacaagtaacccgtatcggtgaggatcaccggaatatccgggcgaatttgattcaccagatgcaggctcaccgccgcctgaatgccaaagctggaagaaagtacatattcaccgggcagattatccagcgcccaggctacgcggccttcagcgtccagtttttccagttcggcgttagtttccgccagcgccagaatgcgatctaccttcggcagttcgttcagggcgtttagatcgagtttggacatagattcctcactgtttgccttgcctgatgcgacgctcacgcgttcttatcaggcctacaagaccgggctgatggttaatcccacaaatcacgcgccggatcgagcaccgggcgaatgatgcccgcacgcaccgtaaagtcgccgaagccttcacccgcttcgcgctctttcgcccagcgccctatcagttcatcaagcgacgccaggatttccggctcggtgatgttttctttatacatccgtgggatacgtgtcccaatgcggttgccgccaagatgcaggttgtagcgacccggcgctttacccaccaggcccacttccgccagcatcgcgcgaccacaaccgttcgggcagcctgttacacgcatcacgatatgctcatcgctgacaccatgtttcgccattaaattatcgatgttgtcgataaaagacggcaggaaacgctctgcttccgccatcgccagcgggcaagtcgggaatgacacgcaagccatcgagttttcacgctgcggcgtgacggcattcattaacccgctctctttggcgatcttctcgatcttcgctttctcgctttccggtacaccggcgatgatcagattctggttcgccgtaatgcggaaatcgcctttgtggatcttcgcgatctccagcaggccggttttcagcggacgcgccggataatcaaggatgcgaccattttcgataaacagcgtcaggtgccagttatcatcaatgcccttaacccagccaatacgatcgcctcgtccggtgaactcatatggacggatcggttcaaatttgatccccgcgcgacgctccacttccgctttaaacgtctcaacccccacgcgctccagcgtgtatttggttttggcatttttacgatcggttcggttaccccagtcacgctgagttgtcacgacggcttcggccaccgccagcgtatgctccagcggcagatagccaaactcactcgcggtgcgggcgtaggttttcttgttgccgtgttcgatggaaagcccaccgcccaccaacaggttaaagcccaccagtttgccgttttcggcgatcgccacgaagttcatgtcgttggcgtgcagatcgatatcgttctgtggcgggatcactaccgtggttttgaatttacgcggcaggtaggtctggccgaggatcggttcttcatcagtagtggcgactttttcctggtcgagccagatctccgcatacgcgcgggtacgaggcaacagatgctcagaaatcttcttcgcccactcgtacgcttccgcgtgcagctgcgactcgtaagggttcgaggtgcagagtacgttacggttcatgtcgttagctgtcgccagcgcatcaagaccgaccgagtgcagcatctggtgcaccggtttgacgttctttttcagaatgccgtggaactgaaacgtctggcggttggtcaggcgaatgctgccatagatggtgttttcaccggcaaatttgtcgatcgcctgccactgtttagtggtaatcaccccacccggcagacgacagcgaagcagcatcgcgtggcgcggctccagcttctgttcagcacgttcggcgcggatgtcgcggtcatcctgctgatacatgccgtggaagcgaatcagcaggaagttgtcgcccttaaagccgccggtcagaccgtcgtttaaatcttccgcaatggtgccgcgcaggtagttgctttcatgcttcatgcgctcggcgtctgtcagttttccttcgaccactaaaggccctggatgtttttcgctcattagtagacatctcgctgataacggcgctctacgcgcagctcacttaaaaattcatccgccgcttcggtgtccatgccaccaaattcggcaatcacttccagaagtgcctgctcaacgtctttcgccatgcgattagcgtcgccgcagacataaatgtgggcaccatcattgatccagcgccacagctccgcgccctgttcgcgcagtttgtcttgtacgtaaactttttctttttgatcgcgcgaccaggcaagatcgatacgtgtcagcacgccatctttgacgtagcgctgccactccacctggtacaggaagtcttccgtaaagtgcggattaccaaagaacagccagtttttacctggcgcttcgtcggcggcgcgttgctgcataaaggcgcggaacggcgcaataccggtgcctgggccaatcataatcaccggggtttctggattggctggcaggcggaagttatcgttatgttcgataaatacgcggacttcgccctcttcttccacgcggtcagcgaggaagctggaggcaccaccggcacgggcgcggccttccacgtcgtaacgcaccacaccaacggtgacgtgtacttcgttctcgacttccgcctgcgaggaggcgatggaatacagacgcggcgtcagcgggcgcagcagattaattagcgcttcggcatcaagctgtgccggggagaaacgcaccatgtcaacaatcggcgtcgtcgcggcgtaatgctgtaacttcgctttatcgcccaccagcggcagcagtgtttcactgcgggtaagcgtggcgtaattctcaacaatgttggcggtgttgacggtcagttcgaagtgccactgtagcgcttcgttcagaggcaacgttttgccctcgacggtgacaggttcatcgcctttcagccacagcagttcgacaagttctttcaccagtgccggatcgttctgataccagacgcccagcgcgtcacccggctggtaacgcatgcccgagtcacctaagtcaatttcgatatggcgaacgtctttttcagagttacgcccggtaattttctggttaacagagaggctagccaccagcggcgcgtctttgctgtacgggctggtgtggatttcatttaccgcgccagtagcgacggattgcgaaggtgccgcgacaggcgcacgcgatttaagcgcatcaaccacgcgggcgcgccactcgctggcagcagcctggtattcaacatcggcatcgacacggtcgagcaggcgttcaccacccagttccgccagcttgctgtcgaaatctttcccggactggcagaaaaattcataagagctatcgccgaggctaaacacggcaaacgcggtgttttccagctttggcgcttttttggagaacaggaacttatgcagcgcgacggcttcttccggcggttccccttccccttgcgttgacgtcactacgatgagcagtttttcgctggcgatttgtttgaatttatagtcgcccgcgttcaccagcttaacgttcagttttgctgctaataaatcatcacgtaatgcttcagcaacccggcgcgcattgccggtttgcgaggcggagataatagttatacccggcatttctgcggctggcgctggcgtcgctgcaagcgcagcaggctgctgattgagtacgccccagaaatagccagaaacccaggcaagctgggtgggagttaaatcggtcgtggccgcctgaaggcgtgccagttgctccgggttcaacggaagcaacgcggaaggtgggacctgtgtcgtcatgcgtcgttatgttccagtaagcaaagctgtttctgcgccctgtcagcgcccataaaacagaagagaaggtaaggttaacggggcaaacggtgtggattaaagacgggatagcgataactaataaccaaatcgactaacctgttttagcaatagtctttaacaacaaaatagattaaccaacctaatgaaaaacaaatgaatttagccaatcattaagataaatcagcgattttgcgcaacaaagtcgttttagataatgcgaaaaaacagcctttccggtactctacggcggttttatcgtcctgtagagaaattatgatgtccaccacgttatttaaagatttcaccttcgaagccgctcaccgcttaccacacgtcccggaagggcataaatgtggtcgcctgcacgggcattcctttatggtgcgactggaaattaccggggaagtcgatccgcatacgggctggattatcgatttcgctgaactaaaagcggcgtttaaaccaacctacgagcgcctcgatcaccattatctcaatgatattccaggtctggaaaacccaaccagcgaggttttagcaaaatggatttgggatcaggttaaacccgttgtgccgctgttaagtgcggtgatggtaaaagaaacctgcaccgcaggttgtatctatcgcggcgaatgataagagtgtgtcggcggtcaatttcccttaagtaacgctatgttagggtgttgtgttctggatatctggggcatgacatggaagacgactgcgacattattattattggtgccggtattgcaggcaccgcttgcgcgttacgctgcgcgcgagcgggtttatccgttttgttactggaacgcgctgaaatccccggcagcaaaaatctttccggcgggcggttatatacccatgcactcgcggaactcctcccgcaatttcatctgaccgcgcctcttgaacgacgcatcactcacgaaagcctttccctgttaacgcccgatggcgtaacgacgttttccagcttacagcccggcggtgaatcctggagtgtattacgtgcacgattcgatccgtggctggttgccgaagccgaaaaagaaggtgtcgaatgcatccccggagcgacggtggatgcactgtatgaagaaaacggcagagtctgtggcgttatttgtggtgacgatattctccgcgcccgttatgtggtgctggcagaaggtgccaacagcgtcctggctgaacgtcacgggttagtgactcgtcctgctggcgaagcgatggcgttggggatcaaagaagtgctgtcgctggaaacatccgctattgaagaacgttttcatctggagaataacgaaggcgcagcgttgctgttcagcggcaggatctgtgatgacttacccggcggcgcatttctttatactaatcaacaaacgctctcgttagggattgtttgcccgctctcttcccttacgcaaagtcgtgttccggcaagcgagctgctgactcgctttaaagcgcatccggcagtgcgcccgcttatcaaaaacacggaatcactggagtatggtgcgcatctggtgccagaaggtggcttgcacagtatgccggtgcaatacgccggtaacggctggctgctggtgggcgatgcgttgcgcagttgcgtcaataccggaatttccgtgcgcggcatggatatggcgctgactggcgcgcaggcggcggcacaaacgctgataagcgcctgccagcaccgcgagccgcaaaatctgtttccgctttatcatcacaacgtagagcgcagcctgctgtgggatgttctacagcgttatcagcatgttccggcgcttttgcaacgcccgggatggtaccgtacgtggcctgcgttaatgcaggatatttcccgcgatttatgggatcagggtgataaacctgttccaccgctgcgccagttattctggcatcatttacgtcgtcacggcctgtggcatctggcgggcgatgttatcaggagtctgcgatgtctgtagcccgtaatctctggcgcgttgctgatgcgccgcacattgttccggctgactccgttgagcgccagacggcagaacggttgattaacgcctgtccggcaggtcttttttcgctcacaccggaaggtaacttacgtattgactatcgcagttgcctggagtgtggcacctgccgtttgctgtgcgacgaatcaacactacaacagtggcgctatccgccttccggattcggcatcacctaccgctttggataaataataaggataatttatgcccctcttacacctgctccgccagaatccggtgattgctgccgttaaagataatgccagcctgcaactggcaatcgattctgaatgccaatttatttccgtgttgtacggcaatatctgcaccatcagtaatatcgttaaaaagattaagaacgccgggaaatatgcttttattcatgttgatttgctggaaggcgcgtcaaataaagaagtcgttattcagtttttgaaactggtgaccgaggcggacggcattatcagtaccaaagcctcaatgttgaaagcggcaagagcggaaggttttttctgtattcatcgcctgtttattgttgattcaatttcgtttcacaacattgataagcaagttgcgcaatcgaatccggattgtattgagatcctgccaggctgtatgcccaaagtgctgggctgggtgacagagaaaatccgccaaccgctgattgccggtgggctggtgtgcgatgaagaagatgcgcgtaatgcgattaacgcgggtgtcgtggcgctttccaccacgaataccggggtctggacgttagcgaaaaaattactttgacgggataatcgtaaccaattgaatttggtttgatttgtaggccgcacgccacatccgacattcagcgcctgatgcgacgcttgacgcgtcttatcaggcctacaagtccccaggccagaaccgtaggcaggatcatccggcaacacgttattggcaatctgcgtgaatgtttgtcaccagtgcctccagcaccactttccagtcatcaaccacgccaacatctgcctgtgaaaataccgcagcgctggcgtcatgattaatcgccaccacaaacttgctattgcgtacgcccgccattaacgctgctgcgccagaagcgccaacaacaatacacacctcaggtgccagcagatgtccggaaataccaatcactttttcagcatcaacgccaccgttcatcactcgcgcccgactgtagcccacttcggctcccagcttttctgccagcatagcgatttcctggttatctgcctctccgccctgccccaccaccagcacccgtctggcctcagctaatgggtcgcgggtaacatttttcagatcctctgtgctaaccagccagtccggaagcgcacccgggacaatgttcagttgttgcattccagagggcaacgtggcgtttttcgctgctcccgcctgacgcgccagggaaaggcatagcgggcgtttttctgtttgcagcgtcgccgttagcgcatttccccagtgggatttgcgcacgcttacggttggaatatctaacgaagtcacctggcagatgcttgcaccatgtaaacgccaggccagccgggtcgacagttcatcgccaaacgttcccggcggaaagagaacaacgtccgcaggcgttcgctgccactgttccaccaacgcatccagcacctgttccgccactacaggctgaggttcaatctgccagtgcgccagggtacaaccgctgaaatcctgcgccgccagccagcttgctattgcggcattctcctgatttattgtcacaattgcgatattcatggctgcatcctttggcgtaaatagtcctgccatagcttttgagctttttctgctaccgtttgcccatcaatcagcgtcgctccgcgtcgttgctctgctcttgccagttgcagacactgcatcgctggcatttcggcagcaacagttttacggataatttctgctttccccgcagccattcgctggcgcattcccggtactggcaaggccacttcaccgcactgacgcacggcaatcaccgcaggcaagcgaacccggcaacaacgcaacccatgttcagtacgctgttcgagggtgataaacagcgcgtcgagagtgaaacgctccacctgggtgaagcagggccagcccagcatttccgccagcaaaaatggcgtttgcccattctgcccttcgctgctttggcagccggtaattatcagatccagcggattctgatgctgccattcggcaatatggcgagcgacaaattccggcgcaaagcgcagatctgccgccgtctccagcaatacagcttcctcaaacccaagagccatgagatagcgcagccagtgcaatgcccgttcatcccccatgctcaacgcggttaaagacatcggcgtaccgttttttctctgcgccaacagcagcgcggcagcggcctgttcatcagcaccgagtaaacttcgcagtagcgaaatatccggtccgcttttaccctgagccgccgcctgccactctttttccgccagcattccggcatccggttcggctttaaacgctaacagaatgttcattcgcacctcctacatttcccgccgccaccagcgggagggctttagtttctggtgcccatagccaggtcacaacaaaaccaaccaacaacactgtcgccaggagcaataaggtgacttgcattccccactgcgccagcacccacggcagcaggccagtacttaccgccgcgccaagtcgactcatggcagtggcaaaaccgacgcccagcgagcgaatgtcagtaggaaaactttccgcaggcaaaatgcccaccagattactgactgccgaaatggtggtgctgaagagaacaaaaagcagcagcgttaatgaactgccggaaggcaaacaggccatgactaccagcgttgccgccagcagcaaaaaacttcccagcaaaaatttgcgatgtgccagcaggtgcgtcagaactaatcccagcagcgcgcccacaattaacaacgcattaagcatcaggctggcagtcagcgcatcttccagaccaatagtctgggcgatagttggcagccaggtataaatcacaaaccatgggattacgaggcagacaaagaagacgctgttaaacgccgtgcgccgccagtaacgcgaagagaacaaggttttgatgtgtttatgggtcgccgttaccacttcatcgcccagtaaaacatggggaccaaaatagcgatgcacgatagcgtgagcttctgcaaaacgcccctggcgcagtagccagcgtggtgattctggcgttccccagcgtaataacgtaatcaacaacgcgggcagagctgccgatgccagtagccagcgccaggcctccgggttttcggaaataaagtgatgtccggcaatacttgccagcacatagcctacggtccacaccacgctgaatgcgcccagcaaaataccgcgatggcggcgcggggaaaattcagccagcaaggtgtgacctactgaataatcgcctcccagaccaatgccaatcaaaatgcgcagtccaataagatgctctggcgtggtggcaaaaaattgtaaaaacgaagcaagcgtaatcagcaaaaagctgaaggtgaagattttttgccgaccaatatggtcggagatccacccaagaaccaggctgccaaggaacaaaccaaggagcgccgagccgccgatcattcccgccataaacggcgtcagttgcatggcgggcgtaagctgaataatggcgtaaccaatgacgccgagaacataaccgtcggtcaggtgtgcgccgaaagtgagcgcagcaatgcggcagtgaaaacggttaagcggtaaatcatccattcgcaccggtgaagtgttcatctttaccccttcattgtccggtaataagaacggcttctcgcctgagaagccgaaaaggcaacgccccgtcatcgcggaacgctgcctgacacattatttttcaatcggatagatagtacccgtattcataatgccattaggatcgaactgctttttcagcccttccagcaacgcccacgcgctgccgtgttccagtttgctccagtgaacgcgatgtttaccgataccgtggtggtgcaccatcgaaccgccgaggcgaatggtttcttcacagatgatcttgttgagcggattgtggtacttgtcgatttcctcttccggcttacagtcaacgacgttgtaatcgtagacgaagtacatgttggtgccgttctgatagctatgagaggaatgaccgcccagcatggtgatgtcgtcggcgtgcgggaactcagtacgaatacggttaataacgctttcgtagatttcgtggatgcagctccagcagccggatacttcggtggtaaagcccatgttgccggttttgaggatctgcacacgttcggcagccactttatccggtccccagttcaggttgttaaaccaggtttcgatcagcttgctgtccacgcgctggcattgcgggtagcgggcaacgatttccgcaatcccttcgcccgtcaccttcgcaatgcgagggttaccttcagccataaagatcagcacgcattttccgtcggcaaaatgggtgaagtgttgggtgccatcttcagcgtcatacaaacgagcgattgacggacgatacccttccaccatgatttcacgcaggatgttgaagccggttttcatgtcttccaggatatagccgtagaagaggttgttttccggggtgaatttaaagattttcactgttacttcagtgatatagcacaatgcaccttcgttgccgatgatgatgtgacgaatgtccgggccagccgcgcggcgtggcacgtttttaatgcgtgtgacggtgccatcagccaatactgcttccagaccaacgaccatatcttcgattgcgccgtagagtgtggagaactgcccgatacttcgggttgctaccaggccgcccatctgcgccagcggctttgactgcggagaatgccccgtggtgtaacctttttcacgcaacgcgttttccagcacttccagcggaacaccacattgcgccgtcgcctgcatattctcaatatcaatattaatgatttgattcatggcggagccgtcgagcaccaccgagttttctacaacagtttccagcccaccttcggtggcggaagcaccggtacgcggcacaccgttaattttgtgcgcattcataaaattcagcacacgggatacttgctctgtggaaccgagttttacgaccgctgccggaatcggcaaagtataaatgccatgaatatccggaaatttacgaaaacggtcaatactgtttttctttaatactgtttcatcggtaattacgcgatctgcaccaacaatttcctttagctggtcgacaatcgctgcgcgagataaagacatagtaattccttcctgataataaaaatggaataatcattaataagagaaaacagaaaccaccgttatgggttagcgcactaaataaccgccatcaaccactaataaatgcccgttgacataattcgatgccggacttgcgaggaatacggctgcgcccattaaatcctgagtatcgccccaacggtttgccggaatatgatcaagaacgcgctgattggtttctggattactgcgtgtcgccagcgtaatatctgttgcataatagccaggggcgataccatttacctgaatattatattgacctagttcatcacaataagctttggtgaacccggcaagagcatgtttagtggcagaatatgcaggtgaccattgtccacctaagtaagagaacaatgaacagatattaataattttgccgcttttctgcgggatcataatttttgcagcttcatagcttaactcgaatgcggcggtcaggttcacatcaatcatcggatcccagtcggcacgaccgaagtccagcaccttattcagcttacaaataccggcattgttaaccagaatatcaactgtaccgaaacgctcacagcaagcagcgataatcttctgcggcgcgccttctgcggtgatacccacctgcatgaagtccacctcaacaccctgtttttcaatcatttcctttgtttcgccgttatctttgacgaaactaggaataaagatatttgcgccagctttggccaacgccatggcaaatgcctggcctaaaccgctattcccaccggtaacaattgcggttttacctttcagggagaaaaaatccattgagaacgcattgagagattcgattgacatagttagctccaatttccgtaaggcaaaaaaaaagaaaggtaacttcccccgcgagagggaagttacctttctcattatctctggtaactggagataatttttagcataagggcataactgctaatgtgatcgtaatcacagtgtgatattcgtattgtcaaataattttaaaaagcagaagcgtgattactctcacacaacacctctgctttccatgttatttattatttcaattactagagacctgagaaaagtaatccacctgaaagggcggcttacttttctcttttttttgtctattacaaatgggaatacgatatgcaacacaactcatatcgccgttggataaccctcgcgataattagttttagcggcggcgttagtttcgacctggcttatttacgttatatttatcaaattcccatggcgaaatttatgggattcagcaataccgagataggtttaataatgagtacctttggtattgcggccattattctttatgcccccagcggcgttattgccgataaattttcacaccgcaaaatgattacttccgcgatgatcattaccggattactgggtctgttaatggcaacgtatccaccgctgtgggtaatgctctgtattcagatcgcctttgcgataacgacgattttaatgctgtggtcggtgtcgattaaagctgcatcgttgcttggcgatcatagcgagcaagggaaaattatgggctggatggaagggctgcgcggcgtcggtgtaatgtcgctggcggtgtttaccatgtgggtcttttctcgctttgcaccggatgacagcaccagcctgaaaacggtcattatcatctatagtgtggtttacatcttgttggggattctgtgctggttttttgttagcgataacaacaacctgcgcagtgccaataacgaagaaaaacagtcattccagcttagcgacatcctggccgttttgcgtatcagcaccacctggtattgcagcatggtgatttttggcgtcttcaccatctacgccattctgagttactccaccaactatctgaccgaaatgtatggcatgtcgctggtggcggcgagctacatggggattgtgatcaacaaaatattccgcgcgctgtgcggcccacttggcggcataatcaccacctacagcaaagtgaaatcccctacccgcgtgatccaaatcctttccgtactcggcctgctgacgttaactgccctgctcgtcacgaactctaacccgcaatcggtcgcgatggggattggcctgattttactgctgggattcacctgttacgcctcacgcgggctgtactgggcctgccctggcgaagcgagaacaccgtcttacattatgggcaccacggtaggtatttgttcggtgattggattcctgccggatgtcttcgtttacccaattatcggccactggcaagacaccctgcccgctgcagaagcctaccgcaatatgtggctgatgggcatggcggcgcttggcatggtgattgtctttacctttttgctgttccaaaaaattcgtactgctgatagcgcccccgcaatggctagcagcaagtaagccaggaaaattacaggagaaaaatcatgtcgaaaaaatacatcatagggattgatggcggaagtcagagcacaaaagtggtgatgtacgatctggaaggtaacgtggtttgcgaaggcaaaggcttattacagccgatgcacacgccagatgccgatactgcagaacatcctgacgacgatttatgggcatcattatgttttgccggtcacgatttgatgagtcagtttgccgggaataaagaagatattgtcggtattggtctgggatccatccgttgctgccgtgcgttattgaaagccgatggcacgcctgctgcgccgttgattagctggcaggatgcacgcgttacacgcccttacgaacacactaaccctgacgtggcatatgtcacctctttttcgggttatctgacgcatcgcttaaccggcgagtttaaagacaatatcgccaactattttggtcagtggccggtggattataagagctgggcatggagcgaagatgctgcggtaatggataagtttaatatcccccgtcatatgctgtttgatgtgcaaatgcctggcaccgtcctcggacatatcacaccacaagccgcactggcgacacatttcccggcaggactgccggttgtttgtaccaccagtgataaaccggtagaagctctgggggccggattactggatgatgaaacggcggtaatttctcttggcacttacatcgcattgatgatgaacggcaaagcactgccgaaagatccagtagcgtactggccgattatgtcttctattccgcaaacattgctgtatgaaggttacggtattcgcaaaggcatgtggacggtgagctggctgcgcgacatgctaggcgagtcgttaattcaggatgccagggcgcaggatctttcaccggaagatttactcaacaaaaaagcttcttgtgtgccgccaggctgtaatggtctgatgacggtgctggactggctgaccaatccgtgggaaccgtacaaacgcgggattatgatcggctttgattccagcatggattacgcatggatatatcgttcgatactggaaagcgtggcgctgacgctgaagaacaattacgacaatatgtgtaatgaaatgaatcactttgcgaagcatgtgatcattactggcggcggttcgaacagcgatctgtttatgcagatttttgccgacgtgttcaaccttccggcacgacgtaacgccattaacggttgtgcaagcctgggggcagcgattaatacagcggtaggtctggggctatacccggattacgcaacggctgtcgataacatggttcgcgtgaaagatatctttataccgattgagagcaatgccaaacgctacgacgcgatgaataaaggcattttcaaagacctaaccaaacatactgatgtgatcctgaaaaaatcgtatgaagtgatgcatggggaattggggaatgtggattcgatccagagctggtcgaatgcgtaagtgaggaaggccgggcgggaaactgcccggcctgaacatacctgaatggttatccccgctgacgcggggaacataagttcgacaacttaaaaaatgataacaagtccggtttatccccgctgatgcagggaacataataaaaactttaactagttcggtttatccctgtttttacaaggaatattaactacactcgatgtctttagaataaaagacaatacgaatcgcactttatcaattttcacttaaagtatgaactggatatctttattcataagaactattcatcaacagcgtatagaggcggttatgtaaaaccactcattagcctcaaaacaaagacaaacttccagatttattacttaaccaatgaataacaagcttaaaaaatatactgttattctaaagaaaaaattaacaggcattaattcaatattaaaaaaataatagattaaaatttcttaacgatttaagaatcatacaaataacactttgattaaatttaattttttgtatcgataattgtgaacctctctggcatggagaactattttgaacatgaggtgttacgtggatatgttgcttattacaagtactgctaatataaaaacttgagaaagagataacgggttatatggtggtttatccccgctggcgcggggaactcgacagaacggcctcagtagtctcgtcaggctccggtttatccccgctggcgcggggaacacctgttttcgcaaatctatggactattgctattcggtttatccccgctggcgcggggaacacgggcgcacggaatacaaagccgtgtatctgctcggtttatccccgctggcgcggggaacactggctctgcaacagcagcacccatgaccacgtcggtttatccccgctggcgcggggaacacgaaatgctggtgagcgttaatgccgcaaacacaggtttatccccgctggcgcggggaacacattacgcctttttgcgattgcccggtttttgccggtttatccccgctggcgcggggaacactctaaacataacctattattaattaatgattttttaagccagtcacaatctaccaactttatagtatcacacaaacaacacatccattatgttaaagagcacttaatccattgattaaaaaggtaaatatttaaaataactctatacaaactaaaatctaccaaactttaccgcaataattttcactccagcgaaaaattaatgccacagaatttgtagagaatgctaatgattagccctggatgggtaaaatggaggagttttcagaggcgacaaacaatataaatgagtagaagtctttacaggttccacccatttataacgcttataaatgtttaatcaggcaatatttagatatttatgtgtttgcatcgacaaacgccaattacgcgcaatgcaggtttcaatgcacaaacgtgtggcatcatccttttggctaatcggctgcagtgcaatgactcgcggtttatcatcggtcagcgttgccagtagttcatccagtgcttcaatatcgcgtacgcgccccactggatgcttgatttcgttggctcgctccagtgcctgtgacaacacttcatagccgccgcgcatgttcagctttggcgatacggtaacccaggtattcggtgtgcagcgtacctcatgagtaccactggtttcgatctggcagctaaaaccgttcttttcgagcagatcagtcagtggcagcaaatcatgaatgcaaggctcaccacccgtaatcaccacatgccgcgcggtgtatccctggcgaccaatgacagccagcaaatcttcactgctcgcagccccccacttatcactctctttggtcttcgccagaatgctgaaaagggagacttcccgatcctcaagcttttcccaggtgtgtttggtgtcgcaccaggcacagccaaccgggcatccctgtaaacgaataaaaatggcgggaacgccggtaaagtaaccctcaccttgcagggtctggaacatctcgttaatcgggtactgcatagcattctctgtgaagtggataattgttaattattgcagatcctgccacaacaatcatgtcttattaacattctgttacaggcaggtttaaagaaaaatgcgaaacatatcgttaataattaaagggagtaacgtattatgtcagaagaaaataaagaaaatggatttaatcatgtcaaaacattcaccaaaattatatttattttttctgtattagtttttaatgataacgaatataaaattaccgatgccgccgtcaatttatttatccagatttaatgagaaatttataatgcgctatttcatactaatgttcactttcgtatgttcctttgttgcagcccaaccaactattgtcccacaattacagcaacaagttacggatcttacgagtagcttaaactcataagaaaagaaagaactgacgcacaagttagaatctattttcaataatacccaagtgcaaattgccgtattaattgttcccacaaccaaagacgagacaattgaacaatatgctacaagagtttttgacaattggcgtttaggagatgccaaacgtaatgatgggatactgatcgttgttgcctggtcggatcgcactgtccgcatccaggtaggttatgggctggaagaaaaggtaaccgatgctctggctggagatatcatccgtagcaacatgatacccgcatttaaacaacaaaaattagctaagggattagagctagctataaacgctttgaataaccaactcacttcacaacaccaatatccgactaatccttcagaaagtgaatcagcgtcttccagtgatcattattactttgctattttttgggtatttgcagtgatgttcttccctttctggttttttcatcaaggcagtaatttttgtcgcgcatgtaaaagtggagtctgtatttcagcaatctatcttttagatttattcctgttctccgataaaattttttccattgctgtattttccttcttttttactttcaccatatttatggtctttacctgtttatgtgtacttcagaaaagagcatctggtagaagttatcattcagacaacagcggttccgctggaggctcagatagcggcggatttagcggcgggggcggttcttctggaggtggcggcgcatccggccgctggtaactcaaccataaaaaatgccagcccggaggctggcatttttaaatcagataaagtcagtcttatgcctggcctttgatctctttacgaccgttgtacggtgctttttcgcccagagcttcttcgatacgaatcagctggttgtatttagcaacacggtcagaacggctcatagaaccagttttgatctggcctgcagcagtaccaacagccaggtcagcgatggtagcgtcttcagtttcgccagaacggtgagagataactgcagtgtagccagcatctttcgccatcttgattgcagccagagtttcggtcagagaaccgatctggttgaatttgatcaggatggagttagcgatacctttttcgataccttctttcaggatcttggtgttggttacgaacaggtcgtcaccaaccagctggattttgtcgcccagaactttggtctggtatgcgaaaccgtcccagtcagattcgtccagaccgtcttcgatagaaacgatcgggtactgtttggtcagttcttccaggaagtgagtgaattcttcagaggtgaacgctttgttgccttcgccagccagaacgtatttaccatctttgtagaattcagaagctgcgcagtccatcgccaaagtgatgtctttgcccagttcataaccagcagctttaacagcttcagcgataacagccagagcttcagcgttggaacccaggttcggcgcatagccaccttcgtcaccaacagcagtgttcatgcctttcgctttcagaacttttgccaggtgatggaaaacttcagaacccatgcggatggcttctttcacagttttcgcgccaaccggctgaatcatgaattcctggatatcaacgttgttgtcagcgtgctcaccaccgttgatgatgttcatcatcggaaccggcatagagtatttgcccggagtaccgttcagttcagcgatgtgctcgtacagcggcatacctttagcagctgcagcagctttggcgttagccagagatacagccaggattgcgttcgcgccgaatttggatttgttttcggtgccgtccaggtcgatcatgatcttgtcaatgccagcctgatctttagcatctttgccaatcagcgcctgagcgatcgggccgtttaccgcagcaacagctttggttacgcctttacccaggaaacgggatttgtcgccatcgcgcagttccagagcttcacgggaaccagtagaagcacctgacggagcagctgccataccgacgaaaccaccctccagatgtacttcggcttcaacagtcgggttaccacgggagtcgatgatttcacgaccgatgatttttacgattttggacattaggttttcctcaagtcactagttaaactgaaactccagacaaacaacgcgtacccagggtacgcgttgccgctctaacttttttacttacttcgcctgacgtttctggaactcgctggcggctttcacaaagcctgcaaacagcgggtgaccatcacgtggagtagaagtaaactccggatggaactggcaagccacgaaccacgggtgattcggaacttcgatgatctcgaccaactgatcatccccggaacggcccgcaacgcgcagacctgcatcttcaatctgtttcaacagcatgttgttgacttcgtaacggtgacgatgacgctcaacaattgtcggcgcattgtacagctggcgaaccaggctatcgtcaaccaactggcactgctgtgcgccgagacgcatggtaccgccgagatcgctcttctcgctacgaacttcaacgttgccgttttcatcgcgccactcggtaatcagcgccacaaccgggtacttacagtctggcacaaattccgtagagttggcgttctccatgttggcaacatggcgagcgtaatcaattaacgccacctgcatacccaggcaaatgcccagataaggaatattgttctcacgcgcaaaacgcgcggtcgtaatcatgccttctacgccacgatagccgaaaccgccaggtacgaggattgcgtccagacctttaaggatttcaacgccgcgcgtttcaacatcttgtgaatcgatcagtttgatgttgacgctgacacgattcttcagcccaccgtgtttcagtgcttcgatcactgatttataagcatccggcagttcaatgtacttgccgaccataccgatggtgacttcacttaccgggttcgcttcttcgaagataacctgttcccattcggacagattcgcttccgggcagtttaagctgaatcgtttacaaatataatcgtccagcccctgagatttcaacaggcccggaattttatagatggaatcgacgtctttcagagaaataaccgctttttccggaacattacagaacaatgcaatcttcgcacgttcgttcgccggaacagcgcgatctgaacgacaaatcaggatgtcaggctggataccgatggagagcagctcttttacagagtgctgagtcggtttggttttgacttcaccagacgctgccatgtacggcaccagcgtcaggtgcataaacagagtgtgctcacggccaatttcaacagccatctggcgaatcgcttcgaggaacggcaaggattcgatatcacctactgtaccgccgatttctaccagtactacgtcatgaccttcgccaccttccagcacgcgctctttgattgcgttagtgatgtgcggaataacctgcacggttgcgccgaggtagtcaccgcggcgttctttacgcagaacgtcagagtagatacgacccgtggtgaagttgttgcggcggctcattttggtacgaatgaaacgctcgtagtgccccaggtccaggtcggtttcagcgccgtcttcagtaacgaacacttccccgtgttggattgggctcatagtacctggatcgacgttgatgtacggatccagtttcatgatggtcacattgaggccacgggcttcaagaatggctgcgagggaggctgcggcaatgcctttacccagagaggatacgaccccgccggtcacaaaaatatagttcgttgtcatgctgaacctgagaagttaggttgaaaagacgatggaataaccaagacgggaaagcagtatacccgaacatgacctgtgccacaaactttcattatccctcctcttcgccagcgcactattgaaatcaggagtgagaaaatagcccctttggggtaaatgtttttgacgcaaatcaagcgcttgtcatttaaaaaatgacacaaatggcgcttgaccgcgtaattcccttagagatcaatttcctgccgttttacctgttgccagacttcttccattgtttcgaggtcaacacctgtcatttccagtccacgcgcggcaacaatacgctccacttcgcgaaaacgacgctcgaatttttcgttcgctttttgcaatgcgatttctgctttcgtccctaaatggcgagccagattaaccgtggcaaacagcaggtcccccatttcctcctccagtttagcctggtcgacaacagcctgccgcgcttcgtacatcacctcgtcgatctcttcgtagactttatcgactaccggaccaagcgtcgtccaatcgaagccaacgttggcgcaacgtttctggattttttgcgcacgcattaaagccggtaaactacgaggaatatcgtccagcgccgaatgctgcgctttctgcgcgcgctcttcggttttgatttgctcccaacgggcaagcacttcactactgttttcggcagaactatcagcaaaaacatgcggatggcgacgctctaatttatcgctaatagcagcgcaaatatcattaaagtcaaagcgcccttcttcctgagccatttgcgcgtaaaacaccacctggaatagcagatcgcccagttcaccgcgaagatcgtcaaaatcttcacgggcgatggcgtccagcacttcgtaggtttcttcaagggtgtaaggcgcaatggtggcaaatgtctgctctttatcccacgggcagccgttttccggatcgcgcaggcgctgcataatagtgagcaaacggtcgatttgattcattgaattgtcctgaaaattgcgggtctgtcaggtggaaacctgtgaccagaatagaagtgagttagtaacactacccaatcagtacgttaattttggctttaatgagttgtaattcctctggggcaactgttcctttcttcgttgctcctcttgcccgccaggcgatactttttacctgatcagctaacgctacgccatcacgttcctgaccggataaaacaacttcgaacggatatccttttgattgcgttgtacaaggaacacacagacacatacctgttttgttgttgtacatgaaaggactcaggacaacagctggacgatgtccagcttgctcgctaccttttgtcgggtcaaaatcaacccaaatcagatcgcccatatcgggtacgtatcggcttaccattaccagacttccttatctttcggctctccccagtcgatattctcgtggaggttttccggcgtgatgtcgttgaccagttcagcaagcgtaaatacgggctctttacgcactggctcaataattaatttgccatccaccaggtcaatcttcacttcatcatcaatattcagattgagcgcctgcattaacgtagccgggatccgcaccgccggtgaatttccccaacgctttacgctactgtggatcataaccctttcctcaaaccgctatcatatgtagatacagtatatatcaatctacattgtagatacgagcaaatttcggcctaactcccgtgcaaccgacgcgcgtcgataacatccggcacctggttgagtttacccagcacgcgccccagcacttgcaggttgtaaatctcaatggtcatgtcgatggtcgccagttgctgtttggtgtcgctacggctggcaacgccaagcacgttcaccttctcgttggcgagaatggtcgtgatatcacgtaacaacccactacgatcattagctaccacgcggaccaccagcgaatatccggcggagtagctctcaccccataccgcgtcaacaatgcgttctggcgcatgggagcgcagttccgccagttgttcgcaatcggcgcggtgtactgaaataccgcgcccctgggtaatgaagccgacaatctcatctccaggaatcggctggcagcagcgcgcgatgtggtgcatcaggttgccaacaccttcgactaccacgcgaccgttatctttactgcggttttgcggcgtgtagcttttttgctgaagttgcttcagcgcggcggcgtcctgctcttcggcactcggcttattaaattgcgattgcaggaagttcaccatctgattgagacggatatccccgccaccaatcgccgccagcaactcgtcgacatcattgaagttgtaacgcggcagcagatgtttttctgcttctttcaggctgatccccagatgttccagctcgtcgtcaaggatttgccgcccagccagaatgtttttgtcacggtcctgtttacggaaccaggcgtgaattttcgaacgcccacggctggttgtgacgtaaccgaggtttgggtttaaccagtcacggctggggttcggctgtttctgggtgataatttcaatctggtcgcccatctgcagctggtaggtgaacggcacaatgcgcccgccaatttttgccccgatgcagcggtgtccgacatcactgtggatgtggtaagcgaagtccagcggcgttgatcccgcaggcaaatcaacgacatcacctttcggcgtaaagacgtacacccggtcgtcaaagacctgactacgtacttcgtcgagcatttcgccggaatcagccatctcttcctgccacgcaatcagtttacgcagccaggcaatccggtcttcatgtcccgaacgtgcgccgccagcagccgcgccctctttatatttccagtgcgcagcaacacccaactctgcatcttcatgcatctgtttggtgcggatttggatctcaacggtttttccacccggccccagaaccacggtatgaatagactgataaccgtttggtttcgggttagcgacgtaatcgtcaaactcatccggcaggtggcgatagtgagtgtgcactatccccagtgcggcatagcaatcctgtaaacgctcggcgacaatacgtaccgcacgcacatcaaacagctcatcaaaggcgaggttctttttctgcattttacgccagatgctgtagatgtgtttcggacgaccatacacttccgctttaacgccttcagctttcatctcagcgcgcagatgaccaacgaactcttcgatgtagtgttcgcggtcgagacgccgttcatgcagcagtttggcaattcgtttgtattcggttggatggaggtaacggaagcagtaatcttccagttcccatttcagttgtccgattccgagacggttagccagcggtgcgtagatgttggtacactcttttgccgccagtacacgttcatcttccggcgcatcttttacttcgcgcagatgagcaatacgctccgccagtttgatgactacgcagcgaaaatcatcgaccatcgccaataacatccggcgaacgttatcgacctgttcggaggaaacagaatcagtgtgcgtcgctttcagctggcggatcgccgccatatcacgcacgccgtgaataaggttaacgaccgacttaccgacgctctcacgcagcacatcttcgctgactacgttggcatctggatttgcccctatatttccagacatctgttatcacttaacccattacaagcccgctgccgcagatattcccgtggcgagcgataacccagcgcactatgcggatgccattcgttataatgctcgaacgcctctgcaaggttctttgctgccgttaacccgtctggtttgggcatgatactgatgtagtcacgctttatcgttttcacgaagctctctgctattccgttactctccggactccgcaccgccgtgttcttcggttcaagtcccaacatccgggcgaactggcgtgtttcattagcccggtagcatgaaccattatccgtcagccactccactggagacgacggaagatcgttgccgaagcggcgttccaccgctcccagcatgacgtcctgtactgtttcactgttgaagccgccggtagtgaccgcccagtgcagtgcctcacgatcacagcagtccagcgcgaacgtgacacgcagtctctctccgttatcacagcagaactcgaacccgtcagagcaccatcgctgattgctttctttcacggccactctgcctgtatgtgcccgtttcgatggcggtacagcaggttttcgctcaagcaacagcgcattctggcgcatgatccggtaaacacgtttggcattgatcgcaggcataccatcaagttctgcctgtctgcgaagcagcgcccatacccgacgataaccatacgttggcagctctccgataacatggtgtatacggagaagcacatccgtatcatcagtgtgacgactgcggcggccatccatccagtcatcggttcgtctgagaatgacgtgcaactgcgcacgcgacacccggagacaacggctgactaagcttactccccatccccgggcaataagggcgcgtgcgctatccacttttttgcccgtccatattcaacggcttctttgaggagttcattttccatcgttttcttgccgagcaggcgctggagttctttaatctgcttcatggcggcagcaagttcagaggcaggaacaacctgttctccggcggcgacagcagtaagacttccttcctggtattgcttacgccagagaaataactggctggctgctacaccatgttgccgggcaacgagggagaccgtcatccccggttcaaagctctgctgaacaattgcgatcttttcctgtgtggtacgccgtctgcgtttctccggccctaagacatcaatcatctgttctccaatgactagtctaaaaactagtattaagactatcacttatttaagtgatattggttgtctggagattcagggggccagtctagcatccgccagagggaaaagcagcgccgcccgcagcgtgtcaatgtccatacttaatgtcgagaggatctccaccatctcaacaccacgccacaataacagactggcatccggatgcccctgcgtctgttgcagacaatacgcccaggtttcggctaagcactcacacgacttctggctggtaatacccagacttgcgatccatttttccggatcaaattcaccagccttattgatatgtgcacttcttaccgcaaccatcgtcctctcctttagggaccagacctgccgaaatcggcaaatcgcaactatttaacgcgcgagaaaagtaccatcgattccagatgtcccgtgtgtgggaacatatccagcatcgccagtcgcgcaatggtatatcctgcttttaataacgcttcgctatcccgagccagcgttgcagggttacaggatacataaactatacgaataggttccagttttataatttgctgcataacacctgcggcacctgctcgcgccgggtccagcaacactttatcgaagccgtttttcgcccacggctgctttgtgacatcttcttcaagattttcgtgataaaacgtcacattctgtaagccattaagacgcgcattctgctggcctttttccaccagcgccggaacaccttctacaccgaccacactggcagcttgtgtcgccaatggcagtgtaaagttgcccataccgcagaacagatccagtacgcgatcttcaggttgcacatccagccattccaacgcacgcgctaccattttttggttcacacccgcattgacctgaataaaatcgcgcgggctaaaagttaagcgcaacccgtttgagtcataccagggcatctcaccagagacggtttcgagtatctcactatcgggggcgagatacagatccaggccttcagaatgcgaaaagcgttccagtttttcgcgatctgccgaacttagcggtgcggtatggcgcaaaatcatcagcgtgccgctggttgcctgtaccagttcaacatgaccaagatggcgcatagcttgtaagctgcccagacatgccctgactttgggcagcaatgcttcaagttggggcgctaaaatggggcattgtttgacgtcgacaatgtcactggagcccgctttgcgaaaccccatctgaagttgctgtgttttcggtaagtagttcagacttaaacgcgcgcgacggcgatagccccagggaacatcggcgatcacttcagagacatcgtgtttcattaatcgggcgagtgccgcacttttgcttcgctgctgtaaatccacgctggcgtgttgttgctgacagccaccgcatacgccaaaatgaggacagcgtggcgtttcgcgttccgggctatcgcttaaccggcgtacgactttagcgcgggcatactgttttttatcttcagtaacagtaacttccgcgttttcctgcggcaataatccggggataaatagcgttttgccgttatgtcgcgccacgccctgaccaaaagagtcgaggtcgttgactgaaacggttatgatctgacgcgtcgtcgtgcgtcgttttgcagagtagaattgcgccattggcgagactttctcaatttaacagtgtgaccttaattgtcccataacggaactccatgaccaactacagcctgcgcgcacgcatgatgattctgatcctggcaccgaccgtccttattggtttattgctgagtatctttttcgtcgtgcatcgctataacgacttgcagcgtcaactggaagatgccggtgccagcattattgagccgcttgcagtttctactgaatatggcatgagcctgcaaaatcgcgaatctatcggtcagttaataagcgtactgcatcgtcgccattccgatattgttcgcgcgatttcggtttatgatgaaaataaccgactctttgtcacctccaattttcatcttgatccctcatcaatgcagctcggcagcaacgtgccgtttcctcgccagctcactgtcactcgtgacggcgatattatgatcctccgcacgccgattatttctgagagttactcccccgacgaatcgcccagtagcgatgccaaaaatagtcaaaatatgttgggatatattgcgctggagctggatcttaaatcggttcgcttgcagcaatataaagagatctttatttccagcgtgatgatgctgttttgtatcggtattgcgcttatttttggctggcgcttaatgcgcgatgtaaccggtccgattcgcaacatggtgaataccgtcgaccgcatccgtcgcgggcaactcgacagccgggtggaaggatttatgctcggcgagctggatatgctgaaaaacggtatcaactcgatggcaatgtcgctggctgcttatcacgaagagatgcagcacaatatcgaccaggcgacgtccgatctgcgtgaaacgctggagcagatggaaattcagaacgttgagttagatctggcgaaaaagcgcgcccaggaagcggcgcgtattaaatccgagtttctggcaaatatgtcacacgagctgcgtacaccactgaatggtgttattggctttacccgcctgacgctgaaaacagaattaacaccaacgcagcgcgatcacctgaatacgattgaacgttcggcaaataatttgctggcaattattaatgatgttctcgacttctcgaaactggaagcaggtaagctgattctggaaagtattccattcccactacgcagcacgctggatgaagtcgttactctgctggcacattcttctcacgataaagggttagaactgacgctcaatattaaaagcgacgtgcctgataacgtgatcggcgacccgctgcgattacagcaaatcatcactaacctggtggggaatgcaattaaattcaccgagaatggcaacattgatattctggtagaaaaacgtgcgctgagtaataccaaagtgcagattgaagtgcagattcgggataccggcattggtattcctgaacgcgatcaatcgcgcttattccaggccttccgacaggctgatgccagtatttcccgccgtcatggtggcaccgggctggggctggtgattacacaaaaactggttaatgaaatgggcggcgatatttcgttccatagccagccgaatcgcggttcaactttctggttccacattaatctcgatctgaacccgaacattattatcgaagggccatccacccagtgcctcgcaggtaagcgcctggcctatgtcgaaccaaactccgcagcagcgcaatgcacgctggatattttaagtgaaacgccgctggaagtggtttatagcccaacgttctccgcgctgcctcccgcgcattacgacatgatgttgttaggcatcgcggtgaccttccgcgagccgctaacaatgcaacatgagcgattagcgaaagcggtatcgatgaccgatttcctgatgctggcacttccttgccatgcacaagtcaatgctgaaaaactcaagcaagatggtatcggcgcgtgtctgctgaaaccattaacacctacacgcctgttgcctgccctgacggaattttgtcatcacaaacaaaacacgcttttgcctgtaaccgatgaaagtaagctggcaatgacagtcatggcggttgatgacaaccccgctaacctgaaacttatcggcgcattgctggaagatatggtgcaacatgtggaactttgcgatagcgggcatcaggcggttgaacgggcgaaacagatgccgttcgatttgatcttaatggatattcaaatgccggacatggatggcattcgggcctgcgaactcatccaccaactcccgcatcagcaacaaacgccggttatcgcggtaacggcgcatgcaatggccgggcaaaaagagaagctgcttggcgcagggatgagcgattatctggcgaaaccgattgaagaagagcgattgcataatttgttgttgcgctacaagcctggcagcggtatttcctctcgcgtcgtgacgcccgaagtcaacgaaattgtggtgaacccgaatgcgaccctcgactggcaactggcactacgccaggcagcaggaaaaaccgatttagcgcgcgatatgctgcaaatgttactcgatttcctgcctgaagttcgcaacaaagttgaggaacagctggttggagaaaacccggaaggcctggttgatttgattcataaactgcatggcagttgcggctatagcggtgtgccacgtatgaagaatctctgccaactgatcgaacaacagctacgtagcggtactaaagaagaagatttggaaccggagctgctggaactgttggacgagatggataatgtcgcgcgcgaagccagcaaaattctcgggtaatggatgtcttgtcgagtagcaatcggctttttatgacgctggtttcagattggtgacaaagtgcctgtgtttatgccggatgcggcgttaacgccttatccggcctacaaaaccaattaaattcaatgaattaaaaaatgatgtagacctgatacatagcacaacaggctattttgcgtttagcatcagtctcaaaccggctccagatagagccggttttggttttctgtcttaacgcaccatgcacgggcgcttgttatcgaacgtccagccaggaatcagatactgcattcccatcgcatcgtcacgcgcgccaagcccgtgtttctgatacagctcatgggctttcatcacttgatccatatcgatttctacacccagccccggtttttctggcacctgtaccagcccgcctttgatctcaaacggttctttggtcaggcgctgattgccttcctgccaaatccagtgcgtatcaatagcagtaattttacccggtgcagcggcggcaacatgggtaaacatcgccagggaaatatcgaagtggttgttagagtgtgaaccccaggtcaggccaaattcatggcacatttgcgccacacgtaccgaaccttgcattgtccagaaatgcggatccgccagcgggatatcaacggattgcagggagagcgtatggcccatttgccgccagtcggtggcgatcatattggttgcagtcggtagacctgtcgcgcgacggaactctgccatcacttcacgcccggagaaaccttgctccgcaccacacggatcttctgcataagccagcgaacctttcaggtatttaccgattttaatcgcttcgttcagcgaccaggcaccgttaggatcgagcgtaatacgcgcctgcgggaagcgttgcgccagtgccacaatagactcggcctcttcttccccggccagtacaccgcccttcagtttgaaatcgttgaagccatatttttcatatgccgcttccgccaggcgcaccaccgcatccggcgtcatcgcttcttcatgacgcaggcgataccagtcgcatgagtcatccggctggctttgatacggcagcggcgtggctttgcgattaccgacgaagaacagataaccgagcatttcgacttcgctacgctgttgaccatcgcccagcagcgatgccacgtttacccccagatgctgccccagcagatccagcattgccgcttctatcccggtaactacatgaatagtggtacgtaggtcaaatgtctgcaaaccgcgcccaccagcatcacgatcggcaaaagtattacgcaccagcgtcagaacgtttttgtattcacccagcgttttacctaccaccagcggaatcgcatcttccagcgttttacggattttctcgccgccgggaatttcccctacgccagtgtgaccagaattatctttgataatcacaatattacgcgtaaagaacggtgcgtgtgcaccactcagattcatcagcatactgtcatgacccgccaccgggataacctgcatttcagtaacaacaggcgtcgtaaattgagaactcatatttatgtcctttttcagaatcaatgacggccgaaaacgggacgtttacggtcaaaggtccagccggggatcaggtactgcatcggacctgcgtcgttacgcgcaccgccaggcagacgtttataggcctcatgtgccttttgtacctgttcccagtccagttccacgcccagaccgggcgcatcaggaacggcaatttttccgtttttaatctccagcggattttgggtcaggcgacaatcgccctcctgccaaatccagtgggtatcgatagcggtaggattacccggtgccgccgcgcccacatgggtaaacatcgccagagagatatcgaaatggttattagaatggcagccccaggtcagcccccagtcgtcgcaaagctgcgccacacggactgcaccggaaagcgtccagaagtgcggatcggcaagtggaatatctaccgcattgagcatcaccgcatgacccatttcgcgccagttggtggcgatcatgttagtcgcgacgggcaagccggtcgcccgtcgaaattccgccatcacttcacgtccggagaagccctgttctgcgccgcatggatcttcggcataggtaagaacatcattcagccctttgcataaagaaatggcttcatcaagcagccatgcaccgttgggatcaacggtaatccgcgcatccgggaagcgtttcttcaatgcacgaacagtgtcgatttcttgctcgccaggtaacacgccgcccttaagtttgaaatctttaaagccgtagcgatcctgtgaggcttccgccagacgcacaacggcttcgctgttcattgctttctgatgccgcaactgataccactcatggttgcccggcgtattttccacataaggaagatcggttttggtccgatcaccgatataaaacagataaccgaggacggtaatagcctcgcgttgcttgcctggccctaacagttcgcagaccggaacattcagcgccttacctagcaggtcaagcaaagcggcttccagcgccgccacggcgttaacgcgtaattcaaaggtccaggcacctttaccgaaggtatcaaaatcggcggcctgattacctttatgcacctgctggaccactttattcagtcgcgcaacttcctggcccagaaccatcggaatagcatcgacaagcgtctgataaatcacatctccgcccggcgcttcaccaatgccggtatgcccggcgttatcggtgagtaccacaatattgcgggtgaaatatgcgttatgtgccccaccaatattaagcaacatgctgtcatgcccggccaccggaatgactttcatatcagtaataacaggactggattgtgtcgccatcttattgccccgcaacaggtttcaactcgatacgcttgatatcgcccaccagcaccaggtagctcagtaccgcgattaaggcatgaacaccaacataaatcagcgccccattaaacgagccagtcgtgccaacgatataaccaattgcgattggcgtgacgatgccagaaatgttaccgaacatgttgaacaggccaccggaaagaccgctgatctcttttggcgcggtatctgccattactgcccaacccagcgccccgatgcccttaccgaagaaggccagcgccataaagccgatgatcatccactcaacgttgacgtagttgcagaacaccatcaccatcgacagcaacatgcccattacgatcggtgttttacgcgcaatgttcagcgatcccgtgcggcgcatcagccagtcggaaataatcccacccagcacaccgccgataaaaccgcaaaccgccggaacggaagccacaaagcccgctttcagaatcgacatcccgcgtgcctgcaccagataaaccgggaaccaggtaataaagaagtaagtcagggcgttgatacagtactgaccgatataaacgccgatcatcatccgtgaccctagcagctgtttgatctgcccccacttcacgctgaacggcactttaactttggtgttttgctgatccatattgatcagcgcaccacccgcggcgatgtactccagctctttcttatttacccccggatgttgatttggctcgtggatgactttcaaccagataaagctgatgacaatccccagaccgcccataaagaagaagacgtgtgaccagcccacttcatgcgtcagccagcccataatcggcgcgaagatcaccgttgcgaagtattgagcggagttaaaaatcgacaccgccgttcccctttcctgcgccggaaaccaggccgcaacaatgcgactgttgccggggaaagatggcgcttcagcaagcccgaccaggaagcgcagcgtaaacagggcaacgataatgccgaatccactaaagatatcgacgaagccttgcagcaaggtaaacatcgaccagataaagatcgaccagaagtagacgcgttttgaaccaaaacggtccagcaaccagccaccagggatctgcccgataacataagcccatgagaaagcagagaacacatagcccattcccacgggatcaaggccgatatctttggccatttccgaaccggcgatagagagcgtagcgcggtcgccgtagttgaaggatgtgacgataaacaacatcaccactatccagtaacgagcatttgtgcgtttttccacactgctcgcagcctgacttaaagaactcattgttgcactcctgaaaattcgcgttagccacgctcactctggactgcgacatcgccaggaaatcagaggtgacgtagggtgttttttgccgtttttataggtcgttcgccgaatacggcgcgtgtttatatctggcaatagcagtataaaaagcgcgccatagcggctcaccgtgcaacaacacaacattaatgcgttcaatgaggcccgattttggcattagccctggacggtggaatccacttcacggaaatgaaaacaagaacaagaaaggaagggttaaaacgaagaaataaagaagagtatgaaatggatcgcttgactccaggcaaacgccagtaaaaatccgcgctatgaagcagtttttactggcatttgcctgaaaagattcgattcagcaccgctaaaacgacatttaccgctcgctgaacatatcaggacaacagcgtgccccactgttcgacccacggatttgattccgtttccggttccgggttctcactggcgtcaatcaacagcatttcgccaacccgctgagcgctctgttcctgcaacaaggcatcgaactgtttgccgccattgcagaaattcacataactactgtcgccgagcgcaatcacgccataacgcagattcggctggaagcccagactatctttgattccctgaaagagtggcacaatgctatcaggaaggtcgccctgcccggtcgtggacgtaaccaccagaacatacttatcctgatagggcagccagtcgcttaattcaggatcttcaaataccgttgctttgtggccctgcgcggtcagaatcgcttccgcttcttcggccactaacagtgaattcccgtacatggtgccgacaaaaataccaatttccgccataccgttttctccctggattaggaacttatctctccatcctgacccgatggcgcactgaactcaaccctttcattttcaggaagcagaccgcgccagccaaattgtgataacgcctgcatccaggtgtcgtccaggcccgcgtgaatagtcagcggctcgccagtaaaaggatgcgtcaatgacaactgactggcatgtagcattaaccgctggaggccaaaatgctcagcaccgctgcgattctggcgtaaatcgccatgtttgctatcgccaataatcggatgacgcaaatgggcaagatgtcggcgaagctgatgtttgcgtccggttttcggctccagttccaccaggccgtagcgcgtggtcgggtaacgtccggtcgctaccggcatttctacggtcgccagaccgcgataatgcgtcactgctggctgcgggcctttatcttcgcgggcaaatttatcagcgattttgtccagttcttccaccagtggataatccagcaccgcttcttccatcaaccagccgcgcacaatcgcatggtaacgtttctggatttggtgctgttcaaactgttgtgccagcagccgtccggcctcgctggataatcccatcaacaacacaccagaagtgggtcggtccagacgatgagcagtaaaaacatgctggcctatctggtcacgcacggtttgcatgaccactactttctcgtcgcgatccagccagctgcggtgaaccagccagccggagggtttatttaccgcaaccagccattcatcctgatagagtatttccagcattagctcgcatcatccgcaaaaagagcatccagtttttccagctcagccagaataagcgcgcgttgcggatggtccgtcgccagcgccatttcataatagggtgcaacggcaaaagcgcccggtaacggctgtttgttatctaacaaatcgtgcattcgcgggatcagcacccactgcaaccactccagtggttccatggtgtccataaagaacggttgggtactattaaattgatgcggctggggttcatcgtttcgccagtgctgatgttcacgcagtaacgcttcaagcgcctgcaactggagacgaacgcggtcatgagtggtcataaagcaacctcaataagaaaaactgccgcgaaggatagcaggaataaaaaaagggagcactgtattcacagcgctcccggttcgtttcgcagcattccagctacttttgttgctccctgctcatccttgacaacttttcctctggccttgcggccaatcgttcatcctgaactattgcttcctgctcacaccaccccgatgtgatacttcatcctgaagtgtccctggccttcctgacccaccgaatcatcctgaccggttctcattctccatcctggaggtgtcctttaacgcgtcctgcgtcatcctcttcgcttcatccagaagcctttccctgaaacaccatcctggtgtgtcctgcagaagtgtcatcatcctgatgttcacttcgttgtctgactccctgtcgacgaagatagaatcgtctttttcgcgaagtcttacaaggcgcttacagacaatgccttaaggaaaatttcatatgaaagttaagaattaacaatcaacattttgattttaaatgaaaataacgattcttatctttttaagtattcgcttatttcctggcgatctcctacagagtctgtaagagatctctcacaaccagatggggtatttggattacagaagaggcttaagttgattaaggaattccgcaagatttgaggctaaatgcgtccgtttacgtgttcccagcgtctctttgcacacttcaccggagagattacacaccgagatgacctctaactcttcttccagcgtcgcgataaatagtgtgggcggcagttttagccttttctgagtcaccagatgaccaatcagattttcctgcacccgacggaagtcgtcttcactccaggtttgcagcaatgtcagtttgatatcgccaaactgcgcgtgcatatccccggcaaactgagtcgtataaaaggtatgaattgtgggttgtatcacaatatcaaaagcgcgttcaaccgcgtttacattttgttccccggtaaacggctggggttgccagtatacggcatcttcggtagttgaaataatgcacggtgaaggaacaccgtacagttcctcacttaacggccagcttttatgctcttcatgccacgcatcgcagtagcgtgcagtaaaatctttcagggcttgtgcggtcaaatcgtccactaatttctctcttcacttaaaccagatacacttgtcgtttagtttatctggtttatgacggtgaaacatgtcttcttatgcaaaccatcaggcacttgcgggcctgactcttggaaaatcaaccgattaccgggatacctatgacgccagcctactgcaaggcgttccacgcagcctgaatcgcgacccgctgggtctgaaagcggataacctgccttttcacggtacggatatctggacgctgtatgaactttcctggctgaatgcgaaaggtttgccgcaggtcgctgtcggtcatgttgaacttgattacaccagcgtaaatctgattgagtcgaagagttttaagctctatctcaacagttttaaccagacgcgttttaataactgggatgaggtgcgccagacgctggagcgcgacttaagcacttgcgctcagggtaagattagcgtggcgttatatcgtcttgatgaactggaaggccagccgataggtcattttaatggcacttgcattgatgaccaggatatcactatcgataactatgaattcactactgactatctggagaatgccacctgtggtgaaaaagtagtggaagagacgcttgtcagccacctgctgaaatcaaactgcctgatcacccatcaaccagattggggttcgctccaaattcagtatcgtggacgccaaattgacagagaaaaactgctgcgttacctggtctcattccgtcatcacaacgagttccacgaacagtgcgtggaacgcatctttaatgacctgttacgcttctgccagccagaaaaattgagcgtttacgcacgttatacccgtcgtggcggtctggacattaacccgtggcgcagtaatagcgattttgtcccatcgaccacaagactggttcggcaataaattttttctcaattttgcgtgctggattcacgcagaaggttgtgaaaggtcatcaggcagggctattgtaatcaaagggaatgacgatattcgtctcataaggagtttttcttgattacacatattagcccgcttggctccatggatatgttgtcgcagctggaagtggatatgcttaaacgcaccgccagcagcgacctctatcaactgtttcgcaactgttcacttgccgtactgaactccggtagtttgaccgataacagcaaagaattgctgtctcgttttgaaaatttcgatattaacgtcttgcgccgtgaacgcggcgtaaagctggaactgattaatcccccggaagaggcttttgtcgatgggcgaattattcgcgctttgcaggccaacttgttcgcggtcctgcgtgacattctcttcgtttacgggcaaatccataacaccgttcgttttcccaacctgaatctcgacaactccgtccacatcactaacctggtcttttccatcttgcgtaacgctcgcgcgctgcatgtgggtgaagcgccaaatatggtggtctgctggggcggtcactcaattaacgaaaacgagtatttgtatgcccgtcgcgtcggaaaccagctgggcctgcgtgagctgaatatctgcaccggctgtggtccgggagcgatggaagcgccgatgaaaggtgctgcggtcggacacgcgcagcagcgttacaaagacagtcgttttattggtatgacagagccgtcgattatcgccgctgaaccgcctaacccgctggtcaacgaattgatcatcatgccagatatcgaaaaacgtctggaagcgtttgtccgtatcgctcacggtatcattatcttccctggcggtgtgggtacggcagaagagttgctctatttgctgggaattttaatgaacccggccaacaaagatcaggttttaccattgatcctcaccggcccgaaagagagcgccgactacttccgcgtactggacgagtttgtcgtgcatacgctgggtgaaaacgcgcgccgccattaccgcatcatcattgatgacgccgctgaagtcgctcgtcagatgaaaaaatcgatgccgctggtgaaagaaaatcgccgtgatacaggcgatgcctacagctttaactggtcaatgcgcattgcgccagatttgcaaatgccgtttgagccgtctcacgagaatatggctaatctgaagctttacccggatcaacctgttgaagtgctggctgccgacctgcgccgtgcgttctccggtattgtggcgggtaacgtaaaagaagtcggtattcgcgccattgaagagtttggtccttacaaaatcaacggcgataaagagattatgcgtcgtatggacgacctgctacagggttttgttgcccagcatcgtatgaagttgccaggctcagcctacatcccttgctacgaaatctgcacgtaatctccgctcccccggtgacgtttgttgccgggttttctcgtttttggtcacttactcatcaactcatttcatttgttatatgaatgtttcttaccaccctcacgcgacaaatatcatcacagttaatatgtcatacaatttatgttgcaacgcaaacgtttccctattttcataaaccgtattttatcgctatgaaaaagaaattatcgccatgattaactaaaagtattgattttttcagttcaacctacatatattgcgcgccccggaagaagtcagatgtcgtttaatgggcaaatattgcccttaaattctcttttacttttgatttacagagtaaagcgttgggataatctatcttccaagtagattattgtatttgagatcaagatcactgatagatacataacttgtgtgtatctttccgccctcaaattattacggcggtaaatgattaagccatcgccgatagacagatttcatttttacggtcaggcaccttcccgggctgaactggctaaaagctgaattatttgcattcctccaggagaaatagatggaaacgactcaaaccagcacgattgcgtcgaaagactctcgtagtgcctggcgcaagacagacaccatgtggatgctgggcctttacggcacggcaatcggcgcgggcgtgctgttcctgccaatcaacgccggtgttggcggtatgatcccgctgatcatcatggctatccttgcgttcccgatgacgttttttgctcaccgcggcctgactcgcttcgtactgtctggtaaaaacccgggcgaagacatcaccgaggttgtagaagaacactttggtattggcgcaggtaaactgattaccctgctctacttcttcgctatctacccgatcctgctggtttatagcgtggcaatcaccaataccgttgaaagcttcatgtctcaccagctgggtatgacgccaccgccgcgtgcgattctgtcgctgatcctgatcgtgggtatgatgaccatcgttcgcttcggtgagcagatgatcgttaaagcgatgagtattctggtattcccgtttgttggcgtactgatgctgctggctctgtacctgatcccgcagtggaacggcgctgcactggaaacgctgtctctggacactgcatctgcaaccggaaacggtctgtggatgaccctgtggctggcaattccggtaatggtgttctcgttcaaccactctccgatcatctcttctttcgccgttgcgaagcgtgaagagtacggcgatatggcagaacagaaatgctcgaagatcctggcattcgcacacatcatgatggtgctgaccgtaatgttcttcgtcttcagctgtgtactgagcctgactccggcagacctggctgcggctaaagagcagaacatctcgattctgtcttacctggctaaccactttaacgcaccggttatcgcgtggatggctccgattatcgcgattatcgctatcaccaaatccttcctcggtcactacctgggcgcacgtgaaggcttcaacggtatggtgattaaatctctgcgtggtaaaggtaagtctatcgaaatcaacaagctgaaccgtatcactgcgctgttcatgctggtaacgacctggattgttgccaccctgaacccgagcatcctgggtatgattgaaaccctgggcggtccaatcatcgcgatgatcctgttcctgatgccgatgtacgcaattcagaaagtaccggcaatgcgtaagtacagcggtcacatcagcaacgtattcgttgtcgtgatgggtctgattgcaatctccgcaatcttctactctctgttcagctaagtcctttcgcgccgctttcgggcggcgcttcctccgttttaacgcgatgtatttcctatgattagcgtattcgatattttcaaaatcggcattggcccttccagttctcataccgttggaccaatgaaagcgggtaaacaatttaccgacgatctgattgcccgtaacctgcttaaagacgtgacccgcgtggtggttgacgtgtacggctcgctctctctgaccggtaaaggccaccacactgatatcgccattattatgggcctggcgggtaacctgccggataccgtggatatcgattccatccccagttttattcaggatgtgaatactcatggtcgcctgatgctggcaaacggtcagcatgaagtggagttcccggttgatcagtgcatgaacttccacgccgacaacctttctctgcatgaaaacggtatgcgcattaccgcgctggcgggcgataaagtcgtttacagccagacttactactctattggcggtggctttatcgttgatgaagagcattttggccagcaggatagcgcaccggttgaagttccttatccgtacagttcagcagccgatctgcaaaaacattgtcaggaaaccgggctgtcactctctggcctgatgatgaaaaacgagctggcgctgcacagcaaagaagagctggaacagcacctggcgaacgtctgggaagtcatgcgcggcggtattgagcgcggtatttccaccgaaggcgtgttgcctggcaaactgcgcgttccacgccgtgctgcggcactacgccggatgctggtcagccaggataaaaccaccactgacccgatggcggttgttgactggatcaacatgtttgcactggcagtgaacgaagagaacgctgctggcggtcgcgtggtgactgcgccgactaacggtgcgtgcgggattatcccggcagttctggcgtactacgacaagtttatccgcgaagtgaacgctaactcactggctcgttacctgctggtagccagcgccattggttctctttataagatgaacgcgtcgatttctggtgctgaagtgggttgccagggtgaagttggcgtggcgtgctcaatggcggcggctggtctggcagaactattaggcgcaagcccggcgcaggtgtgcatcgcggcggaaatcgccatggagcacaacctcggtctgacgtgtgacccggtcgccggacaggtacaggtgccatgcatcgagcgtaacgccattgcggcagtaaaagcggtgaacgccgcacgtatggcgctgcgccgtaccagcgagccgcgcgtctgcctcgataaagttatcgaaaccatgtacgaaacaggtaaagatatgaacgccaagtaccgcgaaacctctcgcggcggcctggcaatgaagatcgttgcctgcgattaatcgctctccaaaggcctcgttttgcgaggcctcttcccgatttctcatccagccgtagcctgttccggcatcgaatgttacccttatcgcctgatctttaagggggttatcgtggctgttcatttgcttattgtcgatgcactgaatcttattcgtcgcattcatgccgttcaggggtcgccctgtgtcgaaacctgccagcatgcgctcgatcagctcattatgcacagccagccaacccacgcggtcgccgtttttgatgatgaaaaccgcagtagcggctggcgtcatcagcgtttaccagattacaaagcgggtcgaccgccaatgccggaagagttgcacgacgagatgcctgcattacgcgccgcctttgagcaacgcggcgtcccgtgctggtcaaccagcggcaacgaagccgatgacttagccgccacgctggcggtcaaagtgacacaggccgggcatcaggcaacgattgtttcgacagataaaggctactgtcagttactttcaccgacattacgtattcgtgattacttccagaaacgttggctggatgcgccatttatcgataaagaatttggcgttcaaccgcagcagttgcccgattactggggacttgcggggatcagcagttcaaaggtaccgggtgttgcgggaatcggaccaaaaagcgccacgcagctgctggtcgagtttcagagtctggaagggatatatgagaatctggatgcggttgccgaaaagtggcgcaaaaaattagaaacccataaagagatggcgtttctgtgccgcgatattgcccgcttacaaaccgatttgcatatcgacggcaatttacagcaattgcggttggtacggtaacggcgagccggatacgccgcaaacgtcgtatccggcattatcacatcagcgcatttaccaggcggtatggtaaagctctacaatatcctcaagcgttgcttcacgcgggttgccaccggtacaaacatcatccagtgccgcctgcgccagtgccggaatgtcttccttgcgtacaccaacatcacgcaaatgtggcggaataccgacatcacggttgagagcaaacaccgcttcaacagcggcattacgcgcctcttccaggctcataccttccactttcacgcccataacgcgcgcgatatcgcggtacttctcaccggtaaagtcagcgttataacgcatgacatgcggtaacaggatggcgttcgcaacaccgtgtggagtgttataaaacgcgcccagtggatgcgccataccatgcaccaaccctaacccaacattcgagaagcccatacccgcaacatactgcccgagcgccatttcttctccggcatccttatcaccagcaaccgatcctcgcagcgccccagcaatgatttcaatcgctttaatgtgcagtgcatcggttagcgcccacgcgccacgggtaatatacccctcaatagcatgagtgagcgcatcgacacccgtcgcagctttcagcgctggaggcataccatccatcatgtcagcgtcaataaacgccacctgcgggatatcatgcggatcaacgcaaacaaacttgcgccgtttctcttcgtcagtgatcacgtagttaatggtcacttctgccgcagtacctgctgtggtaggaattgccagaatcggtacactgggtttattggtcggggaaagcccttccaggctacgcacatcggcaaactccgggttgttgctgataatgccaatcgctttacaagtatcctgtggagaaccaccaccaatagcgatcaggtaatccgcgccgctattctggaatacaccgagcccttctttgacgacagtaattgttgggttgggcactacgccgtcgtaaatcgcccatgccagccctgcagcatccatcttatcggtcactttcgccaccacgccgcattgcaccagcgttttatcggtgacgatcagcgccttctgataaccacggcgtttcacctcatcggttaaagccccaacagcaccccgaccaaaccatgccgtttcgttcagaatcattctgttagccatcatccttctccttgttgctttacgaaattactcttcaattcgtaacccataggttttgaatttctccagcactacggcaatctcttcatcgctcagcactggcaccgggtccgtaatcgccagggtcgtcaggtaaagttgcgccagcacttcaacttcatgcgccagccataacgctttttccagattcacctcacaagcgataagcccatgatgttgtaacaaagttgccttacgatttttgagagccagcgcaacatgttcagaaagttcgcgtgttccaaaggtcgcataaggcgcgcaaggaatagaattaccgccagccgccgcaatcatgtagtgaatagcggggatcgatcggttaagaatggaaactgccgtgcaatgaacggcatgattgtgaacaaccgcgttggcatccggtctgctttgataggctgccatatggaaacgccattcgcttgaggggagctttccttcctcatgtttaccgttgccatcaataaagacaatatgcgactccgtcagtttttcatatggaatgcctgtaggcgtaatcagcatcccatcctgataacgtacactgacgttccccgctgtcccctggttcagtcccaggcgggtcatttccaggcaagtgtcaataatctgacgagcaagtttatttcgttccattagctacctctctctgattcaaaacagggcaataatgttgttcctttcacactattgaattagccgtttaattacccaccatcttcttcctgattaacaagaaagaaattcacaagcttatattttgtgacctggttcaactaatcacagtaaataactgcaagttctctttttataaccccattaaaaatgaccgctcttaaaaatatttatcaaaacggtcatttttctattcctccaagcccggaatgaccgttttcggcacaaacaattaatacggtcatctgatttgtgttttttatgatttattttctgaaacgggcatgaaatttcgattattaaagtgatggtagtcacataaagtcaccttctagctaataagtgtgaccgccgtcatattacagagcgttttttatttgaaaatgaatccatgagttcatttcagacaggcaaatattcactgatatgaagcccgaactcgctggttttgcacttttgaaaacataaccgattacgtgcttaagcttctgaacctaagaggatgctatgggaaacacatcaatacaaacgcagagttaccgtgcggtagataaagatgcagggcaaagcagaagttacattattccattcgcgctgctgtgctcactgttttttctttgggcggtagccaataaccttaacgacattttattacctcaattccagcaggcttttacgctgacaaatttccaggctggcctgatccaatcggccttttactttggttatttcattatcccaatccctgctgggatattgatgaaaaaactcagttataaagcagggattattaccgggttatttttatatgccttgggtgctgcattattctggcccgccgcagaaataatgaactacaccttgtttttagttggcctatttattattgcagccggattaggttgtctggaaactgccgcaaacccttttgttacggtattagggccggaaagtagtggtcacttccgcttaaatcttgcgcaaacatttaactcgtttggcgcaattatcgcggttgtctttgggcaaagtcttattttgtctaacgtgccacatcaatcgcaagacgttctcgataaaatgtctccagagcaattgagtgcgtataaacacagcctggtattatcggtacagacaccttatatgatcatcgtggctatcgtgttactggtcgccctgctgatcatgctgacgaaattcccggcattgcagagtgataatcacagtgacgccaaacaaggatcgttctccgcatcgctttctcgcctggcgcgtattcgccactggcgctgggcggtattagcgcaattctgctatgtcggcgcacaaacggcctgctggagctatttgattcgctacgctgtagaagaaattccaggtatgactgcaggctttgccgctaactatttaaccggaaccatggtgtgcttctttattggtcgtttcaccggtacctggctcatcagtcgcttcgcaccacacaaagtcctggccgcctacgcattaatcgctatggcactgtgcctgatctcagccttcgctggcggtcatgtgggcttaatagccctgactttatgcagcgcctttatgtcgattcagtacccaacaatcttctcgctgggcattaagaatctcggccaggacaccaaatatggttcgtccttcatcgttatgaccattattggcggcggtattgtcactccggtcatgggttttgtcagtgacgcggcgggcaacatccccactgctgaactgatccccgcactctgcttcgcggtcatctttatctttgcccgtttccgttctcaaacggcaactaactgaacatattttccgaataaagtgaggaatctgtaatgaaaaaaatcagcttaccgaaaattggtatccgcccggttattgacggtcgtcgcatgggtgttcgtgagtcgcttgaagaacaaacaatgaatatggcgaaagctacggccgcactgctgaccgagaaactgcgccatgcctgcggagctgccgtcgagtgtgtcatttccgatacctgtatcgcgggtatggctgaagccgctgcttgcgaagaaaaattcagcagtcagaatgtaggcctcaccattacggtaacgccttgctggtgctatggcagtgaaaccatcgacatggatccaacccgcccgaaggccatttggggctttaacggcactgaacgccccggcgctgtttacctggcagcggctctggcagctcacagccagaaaggcatcccagcattctccatttacggtcatgacgttcaggatgccgatgacacatcgattcctgccgatgttgaagaaaaactgctgcgctttgcccgcgccggtttggccgtcgccagcatgaaaggtaaaagctatctgtcgctgggcggcgtttcgatgggtatcgccggttccattgttgatcacaacttctttgaatcctggctgggaatgaaagtccaggcggtggatatgaccgaactgcgtcgccgtatcgatcagaagatttacgacgaagccgaattggaaatggcactggcctgggctgataaaaacttccgctatggcgaagatgaaaataacaaacagtatcaacgtaatgccgagcaaagccgcgcagttctgcgcgaaagtttactgatggcgatgtgtatccgcgacatgatgcaaggcaacagcaaactggccgatattggtcgcgtggaagaatcacttggctacaacgccatcgctgcgggcttccaggggcaacgtcactggaccgatcaatatcccaatggtgacaccgccgaagcgatcctcaacagttcatttgactggaatggcgtgcgcgaaccctttgtcgtggcgaccgaaaacgacagtcttaacggcgtggcaatgctaatgggtcaccagctcaccggcaccgctcaggtatttgccgatgtgcgtacctactggtcaccagaagcaattgagcgtgtaacggggcataaactggatggactggcagaacacggcatcatccatttgatcaactccggttctgctgcgctggacggttcctgtaaacaacgcgacagcgaaggtaacccgacgatgaagccacactgggaaatctctcagcaagaggctgacgcttgcctcgccgctaccgaatggtgcccggcgatccacgaatacttccgtggcggcggttactcttcccgcttccttaccgaaggcggcgtcccgttcaccatgactcgtgtcaacatcatcaaaggcctgggaccggtactgcaaatcgcggaaggctggagcgtggaattgccgaaggatgtgcatgacatcctcaacaaacgcaccaactcaacctggccaaccacctggtttgcaccgcgcctcaccggtaaagggccgtttacggatgtgtactcggtaatggcgaactggggcgctaaccatggggttctgaccatcggccacgttggcgcagactttatcactctcgcctccatgctgcgtatcccggtatgtatgcacaacgttgaagagaccaaagtgtatcgtccttctgcctgggctgcgcacggcatggatattgaaggccaggattaccgcgcttgccagaactacggtccgttgtacaagcgttaatacattactccctgatgtgatgcccggtcgctccggctaccgggcctgaacaagcaagagtggttagccggataagcaatgttatccggctatattgcaggagcgattatgaaacaagaagttatcctggtactcgactgtggcgcgaccaatgtcagggccatcgcggttaatcggcagggcaaaattgttgcccgcgcctcaacgcctaatgccagcgatatcgcgatggaaaacaacacctggcaccagtggtctttagacgccattttgcaacgctttgctgattgctgtcggcaaatcaatagtgaactgactgaatgccacatccgcggtatcgccgtcaccacctttggtgtggatggcgctctggtagataagcaaggcaatctgctctatccgattattagctggaaatgtccgcgaacagcagcggttatggacaatattgaacggttaatctccgcacagcggttgcaggctatttctggcgtcggagcctttagtttcaatacgttatataagttggtgtggttgaaagaaaatcatccacaactgctggaacgcgcgcacgcctggctctttatttcgtcgctgattaaccaccgtttaaccggcgaattcactactgatatcacgatggccggaaccagccagatgctggatatccagcaacgcgatttcagtccgcaaattttacaagccaccggtattccacgccgactcttccctcgtctggtggaagcgggtgaacagattggtacgctacagaacagcgccgcagcaatgctcggcttacccgttggcataccggtgatttccgcaggtcacgatacccagttcgccctttttggcgctggtgctgaacaaaatgaacccgtgctctcttccggtacatgggaaattttaatggttcgcagcgcccaggttgatacttcgctgttaagtcagtacgccggttccacctgcgaactggatagccaggcagggttgtataacccaggtatgcaatggctggcatccggcgtgctggaatgggtgagaaaactgttctggacggctgaaacaccctggcaaatgttgattgaagaagctcgtctgatcgcgcctggcgcggatggcgtaaaaatgcagtgtgatttattgtcgtgtcagaacgctggctggcaaggagtgacgcttaataccacgcgggggcatttctatcgcgcggcgctggaagggttaactgcgcaattacagcgcaatctacagatgctggaaaaaatcgggcactttaaggcctctgaattattgttagtcggtggaggaagtcgcaacacattgtggaatcagattaaagccaatatgcttgatattccggtaaaagttctcgacgacgccgaaacgaccgtcgcaggagctgcgctgttcggttggtatggcgtaggggaatttaacagcccggaagaagcccgcgcacagattcattatcagtaccgttatttctacccgcaaactgaacctgaatttatagaggaagtgtgaaatgctgaaaacaatttcgccgttaatttctcccgaactattgaaagtgctggcagagatgggacatggagatgaaattattttttccgatgctcactttcccgcccattcgatgggaccgcaggtgatccgcgctgatggcctgttggtgagcgacttgctccaggcgattatcccgttatttgaactggacagttatgcaccgccgctggtgatgatggcggcggtagaaggtgacactctcgatcctgaagtagaacgacgttaccgtaatgcgctttcactacaagccccgtgtcctgacatcatccgcatcaatcgttttgcgttttatgaacgggcgcaaaaagcctttgcgatcgttatcacaggcgaacgagcgaagtacgggaatattcttttaaaaaaaggggtaacaccgtaatctcataccggtacgcccgcatgacgcgggcggttatcgaatgatggggtgaaaaatatgaaagcggcacgccagcaagcgatagtcgacctgctgctgaaccataccagcctgaccacggaagctctctctgaacagctaaaggtcagtaaagaaaccattcgtcgcgatctcaatgaattacagacgcagggtaaaattctgcgcaatcatggacgcgctaaatatatccaccgtcaaaatcaagacagtggcgatccctttcacatcaggctgaaaagccattatgcgcataaagcagatatcgcgcgcgaggcgctcgcgtggattgaagaagggatggtgatagccttagacgccagttcaacttgctggtatctggcacgccagttgcctgacatcaacattcaggtcttcaccaatagccatccgatttgccatgaactcggtaaacgcgaacgcattcaactgatcagttccggcggcacacttgagcgcaaatatggctgttacgtcaatccctcgctgatttcccaacttaaatcgctggaaatcgatctgtttattttttcttgtgaagggatcgatagcagcggcgcactgtgggactccaatgcgatcaacgctgattacaaatcgatgctattaaaacgtgccgcgcaatcgttgttattgattgataaaagtaaatttaatcgttcaggggaagcccgcatcgggcatctggatgaggtaacgcacattatttctgatgagcgccaggttgcaacttctttggtaacagcctgacggaaagggtagcaggccggagacgacgccccggccttgcctgttatcgctcgtcgcgacgaccacccaccgcagcccagatgcggcggacgtgcaccgtcacttcttcgcgatcgtgatacaactgccgcgcctgaatctgagcatttatgccatgttcatcaagctgtgcctgaatatacgccagattgtgtgacacttcttcgtagcgttttttcatcggcagtttgaggttgaaaatggtttcacggcaccagccattaaccagccactgcgccatcaatgccgcaactttcgccggtttttcaaccatatcgcataccatccaggagatattgctgcgcgtcggacggaatttgaaaccgtcttcccgcagccacgtcacctgtccggtatccatcagactttgcgccatcgggccgttgtcgacggaataaacccacatgttgcgcttcaccagttggtaggtccagccgccagggcaagcgcctaaatccaccgcccacatcccgttcgccaggcgttcatcccactcatccgcaggaataaacacatgaaatgcctcttccagtttgagcgtggaacgactcggcgcatctgccggaaatttcaggcgcggaatgcccatatagaacggcgaattattgttgctgtatgagtaaccggtatagcagcagcctggtgcaataaagaatacatgcacaaccggacgcttcggcgtttcatagttcgccagcaccccggcatcgcgcaaggcagcgcgtagcggaacagtaaatttacggcagaatttcagtaactctttgctttcgttggtatcggcaacttcaacacgcagttcaccgcccttctctactacgccctgtaacatgccgacaatgggggtaatacgatcttctggcggcaaatgctgcaggagttcccccaccacaaaccactggcgggcaaaaattaatgaactgaacggcagctcacggattaacttatcgccatcatcaggttgataacattcataaatgacataacccgcattctctttcacgcgggcaaaaccgaaaatttcccgctggccggctttatcggtaatttctgcggcgcactctttttcaaagcccggacggcacagcaatacaaccttattcatgacttacgcccttgcgctttaaacggatagcaccaactaacattaacgcccagcccgcgaggaagctcacgccgccaaccggagtgacaaacgcccacaaacgcagatgggacagcgccaggcaataaaggctgccgctgaacaacaccgtgcctaacgcgaggaaaacgctactccagtaaaaccagatactgatgcgacgctgcattgccaccgccagacctaagatcgccagcgtatgaaacgcctggtattcgaggccggtctggatccagcccatctcaacggcccccatggttttacttaacacatgcgcgccaaaagcgcccagagccacaaaaatgaagccgctaatggcggcgaaaatcagcataaaacggctggtcatggtcgtaccctacgtaaattattgttcataacgaaagcggaatttttcttgttcagcagcggctttcgccaggatccattggcgaaaggcggctattttacccagttctgcctgactgtcatgacaaaccagataaaaagcatttttactgaccagaacatcattaaacgggcaaacaagacgtccggcctcgatttcagattgcgccatcacgttatttgccagcgccactccctgcccgtggatagccgcttgcagcaccatggcgctatggctaaaaattggcccttgctgaacgttgatatgatttaaccccaactgtcgggtatatgtctgccagtcacggcgcgaagcatcatgtaataacgtatgtttagccagatcttccggtgtcttcaagggtttttcgccagtcagcagtagcggcgaacacaccggcaataaatattcggcgtacagtttttccacccgtagccccggccagttgccccgaccataaaatatcgccacatcaacatcatccgccagcttatcttcctgacgatcaaccgcctggattcgaacgtcaattcccggataagctgaattaaagctggaaagtcgcggaaccaaccaatgaatggcgaaactggggagtaaactgaccgtcaacgcccccttggcgctacgggcctggagtttacgcgtcgcttcggttaattgcgaaaatatctctttgatatcgaggaaatagctttgcccttcctcggtcagcaggagtgaacgattacggcggcggaacagttttagccccaaaaaatcctcaagagacttgatttgatgacttactgcggcttgggtcacaaaaagctcttctgctgcgcgagtgaaacttaaatggcgtgctgcggcatcaaaaactcgtaaggcatttagcggtggtaatcgtttagacatggctattaaactttgatgttaaatgaatttaacaattagatcacactatgtaacctattagtttttttaatctgagccattataaattgtccgttgagcttctaccagcaaatacctatagtggcggcacttcctgagccggaacgaaaagttttatcggaatgcgtgttctggtgaacttttggcttacggttgtgttgttgtgtttgcaattggtctgcgattcagaccatggtagcaaagctaccttttttcacttcctgtacatttaccctgtctgtccatagtgattaatgtagcaccgcctaattgcggtgcttttttttaccttgcgatcgcgaattactgatccagttcgaccatctctttcacgtcagtacggttgatctgctgtttgttgccattagcgtctttatacgaaatcataccggtatcgttatcagtctgtggtttgccgtcagagacgatggtacgtccgtcattggtgtgcatcacatagttcgaaccggaacaggcgctcagggcaaaagtcagcatacaggcagaaataattgcggcagtctttttcatcatcttctccttaaagcgattaataaatcttaatagtattgattaacaggctaaaattaacgcctaacactattcagcatatgttacttacgcggcttcgccaggatatccagataattctgatggttagcactctccttgtatcaaagtgaattttgcgtcacgatcggtgcatcaagccgaggagtaccatgaacgtttttaatcccgcgcagtttcgcgcccagtttcccgcactacaggatgcgggcgtctatctcgacagcgccgcgaccgcgcttaaacctgaagccgtggttgaagccacccaacagttttacagtctgagcgccggaaacgtccatcgcagccagtttgccgaagcccaacgcctgaccgcgcgttatgaagctgcacgagagaaagtggcgcaattactgaatgcaccggatgataaaactatcgtctggacgcgcggcaccactgaatccatcaacatggtggcacaatgctatgcgcgtccgcgtctgcaaccgggcgatgagattattgtcagcgtggcagaacaccacgccaacctcgtcccctggctgatggtcgcccaacaaactggagccaaagtggtgaaattgccgcttaatgcgcagcgactgccggatgtcgatttgttgccagaactgattactccccgtagtcggattctggcgttgggtcagatgtcgaacgttactggcggttgcccggatctggcgcgagcgattacctttgctcattcagccgggatggtggtgatggttgatggtgctcagggggcagtgcatttccccgcggatgttcagcaactggatattgatttctatgctttttcaggtcacaaactgtatggcccgacaggtatcggcgtgctgtatggtaaatcagaactgctggaggcgatgtcgccctggctgggcggcggcaaaatggttcacgaagtgagttttgacggcttcacgactcaatctgcgccgtggaaactggaagctggaacgccaaatgtcgctggtgtcataggattaagcgcggcgctggaatggctggcagattacgatatcaaccaggccgaaagctggagccgtagcttagcaacgctggcggaagatgcgctggcgaaacgtcccggctttcgttcattccgctgccaggattccagcctgctggcctttgattttgctggcgttcatcatagcgatatggtgacgctgctggcggagtacggtattgccctgcgggccgggcagcattgcgctcagccgctactggcagaattaggcgtaaccggcacactgcgcgcctcttttgcgccatataatacaaagagtgatgtggatgcgctggtgaatgccgttgaccgcgcgctggaattattggtggattaatgacaaacccgcaattcgccggacatccgttcggcacaaccgtaaccgcagaaacgttacgcaataccttcgcaccgttgacgcaatgggaagataaatatcgccagttgatcatgctggggaaacagcttccggcattgccagacgagttaaaagcgcaggctaaagagattgccggatgcgaaaaccgcgtctggctgggatatacagtggctgaaaacggcaaaatgcatttctttggcgacagcgaagggcgcattgtgcgcggcctgctggcggtgttgttgactgccgttgaggggaaaaccgccgccgagttgcaggcacagtcaccactggcattgtttgatgagctgggattacgtgcgcagcttagcgcctcacgcagccaggggttaaatgcgttaagcgaggcgattatcgctgcgacgaagcaggtttaagcacagaaccgggtcggataagacgttcgcgtctcatccgacctgattgtttaaccctgacgcgccgctttcgccatcatcttcttcagcgcatgagaaaccgcaacaaacccaaaggtggcggtcaccatcgttgccgcgccaaatccagatgcacaatccatccgcttcggcccttctgccgtggctttcatcgcacacaccgtaccgtctgactgcgggtacaccagcgcttcagtagaaaacacgcaatccacgccgagcttacctttactgtttttcactacgccaaaatcgcttttcaggcgctcgcgcaacttcgccgccagcgggtcctgaatcgttttcgccagatcggtaacctgaatctgcgtcggatcaatctgcccacccgcgccaccggttgtgaccagtgggattttattgcgccgacaataagcaatcagcgccgctttgggccgtacactatcaatggcatcaatcacgtacgaataacccacgctcatatactgcgctacgttatccggcgtcacgaaatcatccaccaccgttacacggcactccgggttaatctggcgaatacgctccgccataacttccgcttttgccagcccaacgttatcgcgcagggcatgaatttgccgattggtattggtgacgcacacatcatccatatcgataagcgtgattgcgccaatccccgtgcgcgccagcgcttccgccgcccaggaaccgacaccaccgataccaaccacacaaatatgcgcgtcagcaaacagttgcaacgctttttcaccatacagacgcgctgtgccaccaaaacgctgacgccatgcatcactaattaccacagacatagcacctcagaattaaaaagggcgaggttatccctcaccctaaacgcataaatgcctgatgcgctacgcttatcaggcctacataactcctgcaatattttggatttgcatgatttgtaggccggataaggcgttcacgccgcatccggcatgaacaacgcgcacttagtcaataatcaggatgtgaggttacccctcaccctgtcatatccgtaaaaacggcatacagaatatcacatcagccgctaaagacgttacctgcgcccggggcggttttcagcacccagacacgtccatagtggttgtaccaacctgcgcggtgtccggcttccggcccgatcccttgatagatatcgaagtgttggcctttgattgcaccaccgacatccagcgccaccatcagacgcagttcgtactgaccattaaatttgccgttattatccagcaacggcacttctgccagcaaggtagtacctggcggaataatggaacgatcagaggcaactgacgcgcgaccaaccagcggcaccgcacttgcccctttcaccggagcaaaagattgcggtttaaagaagacgaaagacgggttctgttccagcagctcgcgaacctcggcttcactgtgtgtttcgccccagtgacgaatcgcctgcatcgacatatcttcttttttcacttcgccacggtcgatcagcaccttaccaatgctgcgataggcatgaccgtttttccctgcatagctgaaaaagttaagcggactgccatcaccaaagtcgatatacccactaccctgcacatccataatgaagttatccatcagggagttactgtaagcgagaatatatttatcactcaatgcccccgcgtagatctccgcacgagacggcagacgaccacgttttggcggcatacggtaaataggatactggaactcgccctggcgggtatggcgcgcctgaattaccggcgtgtaataaccggtaaactgcacgttaccatagttgtcggcaccttccatctgccaggcatcaatgccgaactggcgcatattgcgggtatcaccgcctgcgcgcagccactcttgcaccgcgttataaacattactctggttgccatacagacgcggtgacgaattacggatatggttaatttgctcggcaaaatcaccggcgttaatcggcgcgccaacggcatctggctggttcaccagagagaaaggctgggtaaatttcccgtctttatattgctgtccgcgatcggttggtttggaagagcaggcggcaagcattgccacaaccgtgcccataagaaggtactttacccaacgtcctttcattgttctcttcttcaggttaaaaaataaggcgcaacgaagataacaaaccgccgcgtttaatgaaatgagcagcctctccctgacgcaaattttgcacaaaaaataggctttagtgatttgtttttgttcaaaatcatgccaaatccgtgatcggggtaaaaaaaaggttgcatgaaaacgcgagcggagtatagtgcgcatccacggacgcggggtggagcagcctggtagctcgtcgggctcataacccgaaggtcgtcggttcaaatccggcccccgcaaccaattaaaatttgatgaagtaaagcagtacggtgacgcggggtggagcagcctggtagctcgtcgggctcataacccgaaggtcgtcggttcaaatccggcccccgcaaccaatcaaatttgatgaagtaaaagcagtacggtgacgcggggtggagcagcctggtagctcgtcgggctcataacccgaaggtcgtcggttcaaatccggcccccgcaaccaattattgaacaccctaacgggtgtttttttgtttctggtctcccataaaaaagcgccattcagcgcctttttatcatccccttctcgccagcgtcgccccatcggcaaaatacgctttaatccccgcaagaatagactccgcaacttcctgctggaaagtcgccgttttcagtttacgctcttcctcaacgttactgataaacgccgtttcgaccagaatggagggaatatctggtgcctttagtacggcaaacccggcctgttcaacttgatttttatgcagcttgttgattttaccgagcttattcagtaccgctttaccaaacttcaggctgtcggcaatggtcagcgactgtaccatatcgaacatggtgtggtcgacatagcggtcaccgcttttgctcacgccaccaatcaagtccgaggcgttctgggtttgtgccagatattttgccgcagtactggttgcacctttggttgagagcgcaaacacagaggaaccgctcggctgacgactggtaaaggcgtcggcatggatagagacaaacaggtcagcacgctgtttctgggcttttgctacgcgcacttgcaatggaatgaagatgtcttcattgcgcgtcatgtacaccttcatattgccctctttctcgatcagagagcgcaaacggcgagctatttgcaataccacatctttttcgcgcgttttgtatttccccaccgcaccggagtcttcgccaccgtggccagggtcaagcataatgacaatcggacgatcgcgccctgctttacccggttgtggaccactttgcgctggcggcacctgcttttcgaggtcgcctttgttgtaatcctccagcagcgccagcagcgggtcctgcatatcctgtgcattggccggatagaggtccatcaccagacgctctttaaacccggcgaccggcgcaagggcaaacagctgcggttttacgttttgctttaattcaaaaaccatccgtacggtttgcgggtcaaattgcccgacgcgcgccgacttgatgaacgggtcgtctgcacgaatttgtgccgccatccccttgagtaccgagttcaggtttacatcttcgatatccaccaccacgcgttcagggttactcaacgcgaactgcttatatttcagctgacgatttgattccaccgtcacgcgggtgtagctggacgcaggccagacgcgcaccgccacgacctggctgaccgcagccagactgacctgacttacgctcaatagccacatggcacccgcgccttgcagtaaacgacgacggctgattgcagtgttggatcctgacatgcctctcccgagcaaaagaaatctaagctgtgtaacaagtaaacgactaatttgaccggaaactttagcgaaagacgcataatctgtcatctaataaacggtaaacattctttttatattcacggcattactgataaaaaagtcgctctcgcataaaatttacacttgcaccctgcgaaaaaacagaataaaaatacactaatttcgaataatcatgcaaagaggtgtgccgtggtaaaggaacgtaaaaccgagttggtcgagggattccgccattcggttccctatatcaatacccaccggggaaaaacgtttgtcatcatgctcggcggtgaagccattgagcatgagaatttctccagtatcgttaatgatatcgggttgttgcacagcctcggcatccgtctggtggtggtctatggcgcacgtccgcagatcgacgcaaatctggctgcgcatcaccacgaaccgctgtatcacaagaatatacgtgtgaccgacgccaaaacactggaactggtgaagcaggctgcgggaacattgcaactggatattactgctcgcctgtcgatgagtctcaataacacgccgctgcagggcgcgcatatcaacgtcgtcagtggcaattttattattgcccagccgctgggcgtcgatgacggcgtggattactgccatagcgggcgtatccggcggattgatgaagacgcgatccatcgtcaactggacagcggtgcaatagtgctaatggggccggtcgctgtttcagtcactggcgagagctttaacctgacctcggaagagattgccactcaactggccatcaaactgaaagctgaaaagatgattggtttttgctcttcccagggcgtcactaatgacgacggtgatattgtctccgaacttttccctaacgaagcgcaagcgcgggtagaagcccaggaagagaaaggcgattacaactccggtacggtgcgctttttgcgtggcgcagtgaaagcctgccgcagcggcgtgcgtcgctgtcatttaatcagttatcaggaagatggcgcgctgttgcaagagttgttctcacgcgacggtatcggtacgcagattgtgatggaaagcgccgagcagattcgtcgcgcaacaatcaacgatattggcggtattctggagttgattcgcccactggagcagcaaggtattctggtacgccgttctcgcgagcagctggagatggaaatcgacaaattcaccattattcagcgcgataacacgactattgcctgcgccgcgctctatccgttcccggaagagaagattggggaaatggcctgtgtggcagttcacccggattaccgcagttcatcaaggggtgaagttctgctggaacgcattgccgctcaggcgaagcagagcggcttaagcaaattgtttgtgctgaccacgcgcagtattcactggttccaggaacgtggatttaccccagtggatattgatttactgcccgagagcaaaaagcagttgtacaactaccagcgtaaatccaaagtgttgatggcggatttagggtaagcgatgaaaatcgtcggatgcgacatgcgtaacactcgtacgtcgcatccggcaattacgtttattcccgtgaactaaacaacgccgccagaccactgcgccgctcagtacgagtggcgattgccgcacttaatatgcgctcatcggcatacagcgacagacggcgacgcgcgcgggtcaccgcggtataaaccagctctcgcgttactaccggcgtgcgttggctcggcaaaatcaacgccgcatggtcgaactccgatccctgcgatttatgtaccgtcatcgcccacgtagtttcgtgctctggcaagcgactcggttgcacagacttaatattgccgtccggcatcgcaaaccagacgcgcgtcccctgcccgcgatccagcgcaataccgatatcgccattaaacaacccaagcgcgctgtcattacgggcaatcatcaccggtcgaccttcgtaccaacgagagtgcggatgacgatgaattttgcgcttctgttgcataaactgctcaattcgctcattcagtccagccacgccaaacggcccttcccgcagggcgcacaaaagctggtactcattgaacgcctgaatgattaaatccggctcggcacgcgcttgcagcagatccagataacgtccgtaacccgcaagagcttcctcaagcatcgcaatataatcttcgccgctctgtaaaagccgtttttcgatatcagtaaaatcctgctgaaaaacggttttcactgccgttttatcaccacggttgatcgccgcagctaactgaccaatgccagaatcgctgccgaaacgatagcttttttgcagcaggcagagactgtcgcgcaaagatgccgcttctgtgccggttcctgccggaacgtgagtccccgtcaggcggcttagctgcctggcacgctcggcggtaaagcccgcgttggcataagcgcagatatcgcccagcacagccccagcctcaaccgaggccagttgatcacgatcgccgagaaagatcactcgcgcatgatcgggcaaggcgtcgatcagtctcgacatcataggcagatcgatcattgacgcttcatctaccaccagcacatcaagatgcagcgggttaccggcatgatgacgtaaacgctggctacccggctgcgcgcccagcaatcggtgcaaagtgctggcatcttccggaatgcgtttcttttgttcatcggtcagcggtaactgtcgcaaagccttgccgagagattcggttaagcgcgcggcagctttacccgttggtgcagccagacggatacggcagcgttcgccgtcggccatttgaattaacgctgccagcaacttcgctacggtggtcgttttaccggtgccagggccgccggaaatcaccgagatccgccgcgtcagcgccactgccgccgcaactttttgccagttaatttcatcgcttactggaaaaagtttgtccagggtttgcgccagtagagcttcatcaacctcaatggcatgattcacttcgttgaaaaagcgtgccactgtgcgctcgttacaccacatgcgattcaaataaagacgatcgccacagaggatcatcggcgtgggttcatctcccctgctgaccgcttgagaagccagcaagcattcttcccaattttgtagctcaccgatttcactgacacaggtcgccaacagcggatgcgacgcctcgttattttccagtcgtgaaagcggcaaacaaacgtgtccctctccggcatcatgacttaacagtgccgccgcgagggtgacggcaggatgttcatctcccgccacggtcagggcaaattgcacatccagcgggcgtagctgtttgtgctccacagcttccagtaattgcttttgcaatttcattacgcctcctccagggtcataccggcaaacatctcatccatcagggcaatcaacccggcgttgggtcgggttgtgtaaatcccctgttgcggatgttctttatcaacgccacgcaggaacagataaataacgccgccaaagtggtgctcatagtcgtaatcagcaatgcgatggcgcagataacgatgcagcgccagggtataaagctgatattgcagatcatagcggtgtgcctgcattgccgctgccatagcctgttgggtgtaagccgaactgtcttcacccaaccagttggatttatagtcgagcaggtaataacgcccttcgtggcggaacaccaggtcgataaagccttttaacatgccacgtacctgcatgaactccagcggcgggcagcctgcggatagcgggtcaaactggcggattaacgtatcaagctgactggcgataagcggttcactaatcggcagataaaactccatctccacctgtttattgcgggcggaaagttgactcaggcttacgccggtttcattgagaggtgcctggaggacagccgtgatccactcggtcaataccggttcccactgcgattcaaagccgccgagttccagtttttcccgcacccagttcgggtcaaccggctgggtaaaatccaggtcttcaaacaaactgtgcaagaacgtccccggtgacgcaccgcgcggaaactgatgtggtgttaacgtcggttcttcaacgacgctggcaacgcctgcagcatcgacatccagccgaggcatcaaatcctgggcgataccgtgaccacgctgttgcaaaccagagtagctggtgacgcgccagttatcgccgggcaatcgttgtaacgtcttcgcattcagctctgctgtagaaacatcattaacctgccagggttggttatcaccagtttgtgccgtttgccaggcaatatcatcatcgcataacgcttcaatacaggtgcgaagccctgccgcatcttgcggttcccctttttgcagcaaacgcccgagcgcactttggtggacgtcggtgtcaccttttttatcgccacgacggcgcaccagcggtgcaacgccgagactgcaatgccaaaccgaacgtgtcagcgccacgtaaagcaaacgcagatcttccgccagacgttcggcctccgcgaggtcgacgctttctggcgcagcattaagatccagaactgcctcaaacgagtggcgatcgtgataaaacgcctgctcctggacgcggaaattggtgataaacggcagccagaccaatggatattccagccctttcgatttgtggatcgtgacaatctgcaccagatgtttatcactttcgagacgcatttgttggctggaggcattactgtctggctcgaggatatgttgcgataaccagcgtaccagcgcatgttcactttccagctgcgttccggcttcttgtagcagttcgctgatatgcaagatatcggtaagacgccgctcaccgcctgccgttgccagcaagttttcagcaatgttacgcgccgacatcagcgcccgcagcatcggcataacgccacgtttgcgccagatttgccgataaccatcgaactcttcgactaccacatcccacgcatgttcgtcattgttcagcgtttcgatatccagcgcgttcagccccatcattgacgttgccagcgcactacgcagggtgttctcacgttcgggcgtcatcaccgcctgcaacaaccaaagcatttcctgcgcttccagagtttcaaaaacactgtcgcggttcgaaaggtaaacggaagggatttccagcaacgttaaggcatcgcgcacctgggcggcctcctggcggctgcgcaccagcacactgatgtccgaagcacgcaccggacgcgcgtcgtcgccgttcatcagcaacgcttcgccccgctgtccggcttgtagccagtcgcggatttgcgcagcacatacctgcgccatggtactttgataatcgccaacgccgcagctttcgccttccatcagccacattttcatcgcaggctgtgtttcacctttaaatacaaaacgtaacgcctgatttttcccggctgatttcactggaataaacggtatttcgcgaaacatgaacgcgtcatcagtctggctgaaaagcttattcacgctgttcaccattcctggtgcggaacgccagttggtgtctaaagtgtagtgggcgtgaacttcgctacgcgccttcatataagtgaagatatccgcaccccggaatgcatatatggcctgcttcgggtcgccaattagcaacaatgcggtttccggctgatggtgccagatacggcgaaaaattcggtactgctgggggtcggtatcctgaaattcatcgatcattgccaccgggaatcgcgtacggatcgccgctgccaacacctcaccgctttcgctacgcagcgcggaatcgagccgacttaacatgtcatcaaaacccaattcgccacggcggcgtttttcacgcgctactgtttcgcggatctcagccaatgcgcgggtgatcaccagatcgcggatcgacaatggttctgcaagcagttgatcgatcgcctcaaacagtggatgtcgcggggtttcccccccggccttcgtgcgatcttctaagaaacgctgggagaatttttccagcgactccggcaactgataactgtttgtctcttcttctgcccaggcgctgatcttgtcgatccatttagcctgattgctacggttaaacttgcgtcgatcaataccagaagattcgatcagcgcatccagttcacccactgcgtcgcgccactgctgttttaccgtatcaatacgcgccacaatttgcgcgtgacgggaagccagcgtttcatcatcgggcggcggtgctttgataaccggcgcttcgccttgcagataacgattaatatcgcgcagcaacgcctgcggccctttccaggtttcaaagacgacctgggctatttcacgcggcagcgggtagcagtggcgacgccagaaatcggcgcaggcctggtagcgtagcagagactcatcttcaatcagctgctgctcaaacagcatgccggattcaaaggcattcaggttgagcatgcgctggcaaaagccgtgaatagtaaagactgccgcttcatccatctgccgttcggctaacaacaaccactgcgcggcttgcgctttatcgtcgatctcttccagcaggcgttcgtacagtggattgtcggtggtttcacgcagacaggcgatgcgcaactcgtggatattgctacggatacgaccgcgcaattctgccgtggcagcctcggtaaaggtgaccaccagcagttcttcaacggtcagcgggcggggaaaggcggcggaaccgcctagtccaagtaacaggcgcaaatagagcgccgcaatcgtaaaggttttgcctgtgccggcagaggcttcaatcaggcgctcaccctgtaagggcaagcgcaaaggatctagtgtctcggcgacatcactcattcttttcactcatcaggggcattgtttgctgcaacgcgctgacgttctcccacactttccagccttcagggtgtacatattcggctttcccgttctggctgccggaaatctgcgacagaatagccatgccttgcggctcgaccaccgcctgatggaagaaatcagcaagtttttgcggcgtcagcagttttatctgggccacgattttatcacgcgaatcgaagcgcatattgccgcgatcgaaatctttacttaacttcgatgcttcttcgccgagcgtttgcggtgcctgcagcatctgggtaattaccgcctgctggatttgcgcaaactcatctggcttcatcgctcgcaattttgcctctgcggttgggaaaaacgccttgtaacgctcccacaagaatgaaggctgtttatcattgctttgcaaaaggaagcccatgccccactgacgccccacgctcattggaaacgcaaacacggcatagcccaattgttcttcggtacgcaactgattgtagaaccacggctgtacgatctgccccaacagagagctataggctgagctggtgtattcatcgtagccagtcggtacaaataccgctgccagtgcggagtcggtgctgttaccggctttttcaaagatgacggattgttttttatcgaccactacatctttgtttcgacaccactctgaaccatcagcgcccaactgtttttgcacatcgcgtgccagcgttgttgcctgggcctcggtcatgttgccgataaccataaactctggtcgagcccctgattttaaggcgtcgcgataggccagcacctctttcaacgtaatggagggcaaaattttacgccgttcatctcgcgagaagtacggcacttgcgagagcatctgcgcgggcataatcgcctgctcaaacgctttacccttttctgcggaatccatcatctggttataccaggacttcgcctgctcaagctgatcttccgtagcggtatagctaaagtacccctcgagcaatgcctggaacagctgcggcagacgctgggtgtaaccattagcattaaccataaggccgttgttagcgttggtggaaaaacttatgccaccaaccgacgcctggttgcttaactgatcaagcgccagccctgcgagataatcattgagcgcaaacatcacctgattgcgggcgctgtccatggctttcggattacgcaaaatcaggctgacatcagctttgggctcgctggcaaaataacggcttggcgcatacaccacgcgcagattcgactcatcaacaatcagctctggatggtcgtatttcttctctgacttaatcagcgagaaatcatcaggaatataagggttaagctctggcaaagagagcgcaatgtcggcggcttttttctgccagtcggcgaaagtttgtgcgctgattttatcgacctgatacggcgcatcgacaaagtaagccgttttgttgtgcggctctttcgggctgatataccagatacgcgcattctgcggcgtcatcatcgccagacgttcctttactgctttagcatcgtaccgatcggcaatattgactgcatccagcgtatgctcaacaggaacgcgaatcatggtatctgccagccattcgacgtaatccatatcacgggtgatcgacggataacggaagtcgatatccagcacattcgccagttcatcgaagtattgtttatcaatgcctttttcacgtaacagattgagatagctaaaaattgccgccacaacctgatcgcgattagccaggcctttatcggttaaagacgcagagatcgctaatacgccgctgttgccgttgacgataggatcggagttggcgctaatgccctcaactaatccctgcttttgcagccagtcagaaagtgtacctgggctgcgattgccaatcagataggtaatcaattcatcggttttactacggaacttcgctgagttgttatcgatgcgaaactcaacgcgcaacactttacgcggcagcgcagggacgtaatgaatgataatgcccttttgcgcgtcggtgactaccggcacggtgatttccggttttttgctctctttgttcggcacgcgaccaaaggtgtccgccgccatttttgccaactccggcagcggtttattactgtaaataaccgccttcatcaaattggcggaatagtacttctcgtggaaatctttcagcgcctgctgcaccggattaccaggtttgtcgcttaaagtttcgaggttaccaccagaaaactttgaaccggggtgtgccgggttaatggtttctgcgctgacctgtgccatgcgcatcccgtcacgcgtacgcgccatggttaattcagcgttcaccgcattacgctcacgttcggcatatttcttgtcgagcaaaggttcagcaatagcatcggccaggcggtctaccgcaccaggcaaggcgtcgttctcaacttccagatagaaagccgtgcgatacggcgcagtgctggcattgtgactaccgccgtgcattttgagatattcggccagactgtcagcctgcgggtactttttcgaccccatcagactcatatgttcaaggtaatgtgccagcccctggtacgcctcgggatcttccagcgacccaacgggcaccaccagcgccgagagcgatttaactgcctgcggatcagaaaccagcaagaccaccataccgttatccagacgtatagcctgatactggcggttatctttatcacttttacggatggtttcctgaatcggctgccatcccgtttctgcctgacttaagggtgcccaaagggcaactaacaacaataatgctttgaaccaggtgctgcggggcattcacggacctcataatcaacttaattttctgtccagattcaacacgttaacgcaaatcatctgccagaatttaatcttgtgctgcacgagtcagcctatgtttatataaccatcagtccgtgactggtgcgcatcataaagtaagcggatagattgcgcaatttttatacagcactcatgactgattaaagcgaaacagcggtaacaggaaacgttgcgactgttcaacgatggcctccattgtctctggtgttaattgccgccagagcctttgataccagatatcatcaccttcgccacgcaccatcatgttgccttcgtaagcctgaaggaatttcgtacgggctttttgcaacgtggaatcgtcatccagcatggcatcgttttgcgcgtcataacaggtttttagccacgcgccgccactttcaggtaacaccagcaatggcgcggacattccttcacgatacccctcaatcagttgtgagaggtaatgcaaagcctgttcggctgcaagcggcggaaaacgccactcgccgtctttgcgtagaaaaaggcgactttcaccattaccaccgctggcacagtagacaaggtgttccagccaaagttgcattccctgggccacacttaataaagagggacgccagcgcaacaggccatccggctgcacctgcggcaaccagccagttatctgcacaccgttgcaggcgagatcaatttccatactctgccccggctggcgacaggcaatgactctgtcggcaagctgctgcatctcctggcactgtgtttcccagaaaatttcaccaaaagcgccatacggtaaatcccctgccgctcggaagcggcggaacaagcgttcggcatcatcctgctcaaccagtgcattcaataactgctgattgatttgataacggctaagtccttccagaataaatggctcggtgtcggggatttcgctgtcttcagtacggaagttcacctgcaaacgcatctggaaaaatgcccgcaccggatgtgcccagaatcgttgtagcgtttccagcggcacggtttccggtaaggtaaacggcagcggctgaacaaattcagaatgtgctttaccagcctggctggccgcaggtagccattcacgagcatagctttgtcgttcgcctggctggtagttttgtggatcaaacggcatccgggtatggaggcaagtaagatgcgcttttacccttgcctcgctttcatcacagttgagcgcttcatcgcccggtagataatgactttgcccgatgtagtcgatcagttcctgcaccagtaccgacgggaaacgctcactgttatcctgaatggaacgaccgatatagctgatatagagtttttgctgcgcggaaattaacgcttccaggaacagatagcggtcgtcatcgcgacggctacggtcgccacgcttcggtttctggctcatcaggtcaaagcccaatggcgcaagctgacgtggataaacgccgtcgttcattcccagcaggcaaaccactttgaacggaattgaacgcattggcatcagagtacaaatgttaaccggtccggcgagaaaacgctggctgatacgttcttgatccagacgctgtgccagttcatcacgcaatagtgacagcggcaccgcgtcgccatactgcgcacctaaaccttcggcgataatcgcctgccattgttgttcgatcagcgtcatcgccgcttcggtttccgcatccggcaggaagaaggcgttgagcatatcgcgacaaaccggcaaccactcttccagcggacgctcctgtgccagcccgcgacgccagatgtttagctgcattagcagtgaagccagatgccccaccagttctgcaattaagccgctcgattcatcataaggtagaaccgattgccactcgccctgcgcgctctccatcgcgtagcccaacaacatacgcgtcaggccaaatcgccaggtgtgttgtccggtggcggggagttccagctcgcgaacgttgtcgtcatctatgccccaacgaatgccggattcgttgacccactggcgtaaataacgcagcccttcttcggtgatgtcaaaccgcgccgccagcaccggcacatccagcaacgccagcacatcctctgacacaaaacgactgtcaggcagtgataacaggctgataaacgcttccagtaccggatgtgactgccgcgcacgacggtcggaaatggcgtaaggtaggtaacgatccgcaggtgcgctaccaaacacagcctgaataaacggactgtagctgtcgatatcagccaccatcacgatgatgtcgcgcggagtaagtgtcgggtcttcctccagcatcgccagcaggcgatcgtgtaaaacttcaacttcacgctgcgggctatggcaaacgtggaaggtgatactgctatccagtggatcaagcgggcgtttgttatcgctacgggaaaactcttcgatgttcacaccagcaacggcgcggttttccagttccagaatgtcagactgaatgttatgcagcaggttatctggcgtgacatcgacaaaggcgtccagctcctggctgctctccaggtcagaaaggagataaatgtagtcgcgcccaagcttaccccatgaagccagcagcgggttgccgacatcctgttcaccatcgctgttaaagagctgcccggcattttcgctatcacgaaatagcggcaattcgcgatcttcaaaactgtgtcgacgctgacgggtcagcagtttcgccagataagcaggatctttaatatcgccccagtaataacggcaggggttggtaaacaggagatggatttcaatatgtttacccagcgcctgtagcgcctggagataaacaggcggtaacgcggaaataccgcatataaagacgcgcgaaggtaaccccggcgggcaggtcgtcgcggactccagcgtttcgataaagcgctgatagagattggcgcggtgccagcgcggttgcccgagttgatgggtatattccaccagcgccttccacaacggggcttgccaggcctgtgcttctcccagcccttcaaccaaatgtcctgtttcccactgtgccagccagtccggacgatagaccagatactggtcaaacaggtccgccgcttttgaggaaagctggaacagttttcgcttgtcgctatcgtcagtcagataatgccgcaacagggtaaagtcttcgcgctccagcaattgcggcagcagagtcatcagtttccagctcatgctctgtttgttaaaggcgctctctttggggatttccggtaacacccggacgaacatatcccagataaagctcgctggcagcggaaaatcaatgtttgccgcaataccaaacttttgcgacagggtcatttgcagccactgtgccataccggtactttgcaccagaatcatctctggttcgaaaggatcgtccagccgttcgcgttcgacaataaactccatcaacgcttccagcacgtccagacgattggaatggtagacccttaacatagcggctcctgactactgacgattcgggcaatgcaggcgggtcatctcgccttctctgcccccgggtgaaactagcgtaacgctgatgctgacacatcccgcctgcgatgtctgcattcggttgacctgccagttggcaggtggcgaaatcgcgcgcagttgcgtttgctgccagccatgccgccagagctgttggtactggtttctgctggcaagactgttcattaatgttcgctggaaacccgataacgcagtgacaatcatcaccatcaacaccatcgccaacattacctccggcaggctaaagccttgttgattcttcagggaagctgacataacgccctctctttcagcggacaaaaatcgctccagccgcgtggcgaaaaaacaatgtttccatcaatgacttcgcctgttcgccacaacgaaacgccttcataaccggcaatcaataaggcttcattatctgccagtaaacgcaaacaaacctgggcatcggtttcagcgtactgcgagcactgaactgctggctgcgtctgccagcagtgcatttttccccacgccagcgccgactgaacgatggcctggcggcgcaatgactgactttccatgctcacgcgagaggcaaaactgcgatcctgttggctcattccttgtaatagcaaactacccaaaaccagcagcatcaggaccagagccagtgacgaaacacccttttcgcggttcacaggttgaatcctgtcacgctatagctggcattcaccacggtttgcggttcagacttactggcagcacgcatattaaccgtcaacaccggcgagaagccgctgacatcctgacgtacgacctgaaaagtgtcgataatgatggcatccggattagtgactttatcccagcccttaccttcacaggatgtcgcaccgcgtagcgtttccagcacatgctccttcagacgaaatccaatctggtcggactcttttaccggttcgcgatcccagataccgttactgttcgcatcccactgcacaatgacacagtcaccctgtccgacaatttccagcccttcgccggtacagatgccatgacaataacccgccctctggagatgcttcgcgacggtaaatacccgcagccagatttcatcttccagcgccagcttacgggtgctcgttaaactttcacgctgtaacgcaggcagaaagcgtgccgcccccagcaacaatacgctactgatcgccatagcaatcaacacttccagcagagaaaaaccttgctcttttacaggcatccttctgtttctccttgctgacaaagccggagtcttccccacggcgaaaccaccagccaccactcgcccgttgagtttttgaagcgaatatgcccggcccatgcggtattgcgcaggccaaagaaagcaagcgaaggtgtcaggtcgctcatttcgacttcgggccagcgtggcacaaagaccaatggtgaactgccatgacaggtattggccccagcagcggaactcacaaggcaccataacgtcccctccctgataacgctgatactgtggtcgcggttatgccagttggcatcttcacgtaaatagagcaaatagtcccgcgcctggctggcggtttgccatagccgttgcgactgctgccagtattgccagccatagagtccacttgcgcttagcatgaccaaaatcagcatcgcgaccagcgtttcaatcagcgtataaccacgttgtgttttcatgccggcagtatggagcgaggagaaaaaaagacgagggccagtttctatttcttcggcgcatcttccggactatttacgccgttgcaggacgttgcaaaatttcgggaaggcgtctcgaagaatttaacggagggtaaaaaaaccgacgcacactggcgtcggctctggcaggatgtttcgtaattagatagccaccggcgctttaatgcccggatgcggatcgtagccttcaatctcaaagtcttcgaaacggtagtcgaagatggattcgggtttacgtttgataatcaacttcggcagcggacgcggttcgcggcttaattgcagatgagtttgatccatatggttgctgtacagatgcgtgtcgccaccggtccagacaaaatcacccacttccagatcgcactgctgcgccatcatatgcaccaataacgcgtagctggcaatgttgaacggcaggccgaggaagacgtcacaggagcgctgataaagctggcaagagagtttgccgtctgccacatagaactggaagaatgcatggcacggtgccagcgccattttatccagttcgcctacgttccacgctgaaacaataatgcggcgcgaatccgggtcgtttttcagctggttcagtaccgtagtgatctggtcaatatgacgaccatctggcgttggccaggcgcgccactgtttaccatacactggcccgaggtcgccgttttcatcggcccattcgtcccagatggtgacattgttttcgtgtagataagcaatgttagtgtcgccctgcagaaaccacagcagttcatggatgatggaacgcaggtggcaacgtttagttgtcaccagcgggaatccatcttgcaggttaaaacgcatctgatgaccaaaaatggaaagcgttccggttccggtacggtcgtttttctgtgtgccttcgtcgagcactttttgcatcagttctaaatactgtttcatggttcctcaggaaacgtgttgctgtgggctgcgacgatatgcccagaccatcatgatcacacccgcgacaatcatcgggatggaaagaatttgccccatgctgatgtactgcacccaggcaccggtaaactgcgcgtcgggctggcggaaaaactcaacaatgatgcgaaacgcgccgtaaccaatcaggaacaaacctgagacagctcccattgggcgtggtttacgaatatacaggttgaggataataaacagcaccacaccttccagcagcagctcgtaaagctgtgatgggtggcgcggcagcacaccgtaagtgtcgaaaatggattgccactgcgggttggtttgcagcagcaaaatatcttctgtacgggagccagggaacagcatggcaaacgggaagttcgggtcaacgcggccccacaattcaccgttaataaagttgcccagacgcccggcaccaagaccaaacggaatgagtggtgcgataaaatcagagacctggaagaaggaacgtttagtacggcgggcgaagataatcatcaccacgataacgccaatcaggccgccgtggaaagacatgccgccgtcccagacacggaacagatacagcggatcggccataaactgcgggaaattgtagaacagaacataaccaatacgtcccccgaggaagacgccgaggaagcccgcatagagtaagttttcaacttcatttttggtccagccgctgcccggacgattcgcccgtcgtgttgccagccacattgcaaaaatgaaacccaccagatacatcaggccgtaccagtgaagcgccacgggtcctattgagaaaatgaccggatcaaactccggaaaatgcagatagctactggtcatctgtcaccacaagttcttgttatttcgctgaaagagaacagcgattgaaatgcgcgccgcaggtttcaggcgctccaaaggtgcgaataatagcacaaggggacctggctggttgccggataccgttaaaagatatgtatatgatccgcgctataaccctccgcgaatcagcccgcccatgccgcgacgctccataaaggctgcaacctgatggcgaacttcggtcgccagttgcgcttccagactacgctgcgcaagattttctgcttcggcataatcaatgcgccgcagcaggtattttgcccgcgctacagaacgtccgttcatagacagatggcgatacccaagcccaatgaggattgccacgcacatgggatcgcccgccatttcaccgcacaaacggagatcgattccatgtatttccgcttcccgggcgatcatcgccagagctcgtaacattgcaggatgaagactgtcataaatgttcgccacccgggtattgttgcgatcaacggccagaatgtattgagtcagatcgttggtgccaacagagatgaaatcgacccgctttgccagatgcggcagcataaataccattgacggcacttccagcatgatgccgatacgtggtttgggaatttcgtaaccgatcatctcctcgacttcacgtccggcacgttcaatcaggcggcgtgcttcatcaacttcatcgaggcttgtgaccatcggcaacagaatattcaggttgcccgtagcggcattagcacgcagcatcgcccgcacctggatcaagaagatctccggctgatcgagcgtaatgcgaatcccacgccaacccaggcatggattctcttcgctgatcggcatgtaaggcagctgcttatctgctccgacatccagcgtacgcaaggtgacgggtttatcattgaacatttgcagcatcccctgatactgcgccacctgttcttcttccgacgggaaaccactttgcagcatgaatgggatttcagtgcgataaagaccgatgccatcaatacggctgcccagtttttcttcatgttccgggcttaaaccagcattgagcatgacttttatacgctcaccgctttttaactgcgcgggtaaattgacgtcatcttccgccagacggctaagctcaatctcttcactaattagccgctgatattcttgcagcagtaccggctccggatcgaccagcaattcaccgcgatagccatcaacgatcagcgtcctacgatgcagcaccgaaggctgaatatccgcgcccatcacggtagggatccccagcgcacgtaccatgatcgcagcatgggagttggctgcgccatctcgcacgacaacaccgactaagcgatcctggggcagctcagcaagcgttgtcgctgacagttcatctgccaccagaatgaaacgttccggccaggcgttcggcccttgattagcgtcatcaagatgaaacagcaatcgctgacccagcgcacgtaaatcgccagcccgctctttgagatagttatcacttagcgcggcaaactgttcggcaaatttttcaatgaccgtttttaccgcccactctgccaccgagcctttatcaacctcggcaaacaattcgcgacgcagccgggtgtccgaaagcaggtgcgagtaaagatcgaaaatagccgccgtttctttttgtgcaccggcggcaaagcgtttgctgtagcggcgaaactcgtttgccgcttcttccagcgccccggtcagtcgttcgcgttccagagccggatccagcgttgatgcctgatacacctgttccattaaaggtaacgtggcatcctgccagccttcggcaatcgccacaccaggtgctgccggtaatgcgcggattcgcgtctggcgatattgcccaaacaaggcagtcaactgcgactgagaaagaatagctgccatctgggtggcaagcgtcaccaggaaggattcttcactttcgtcatactggcgcaactctcgttgctgtaccaccagtacaccaagcaactggcgacgttgaataattggtacgcctaaaaacgcgcggaaacgttcttcttttacggaggggatgtatttgaagctggggtgcttttgcgcatctgcaaggtttatcggttccgccagcctgccaaccaggccgacgatcccttcatcaaacgcgagcgttacagtgcgaccgcgtggttttttcagcccccgggtcgccatcaggtagtaacaacgtcgatcatgatcggccaggtagaccgaacagacctcggtatccatcgcaagacagatgtcggtaaccagaatatttaacgcctcattcaggcgtggtgcgctggctaccttttcgactatttcgcgcaggcgagtgagcataattggcgtgacttaacctcttttacgtcgataagcagatgcgttttgtggttttggcgtattttcctgcagtgacatcaccacactcgcgaactctttcattaccctacggtagacatcacgtttaaatgacaccacctgtctgaccggataccagtaacttacccatcgccagccgtcaaactctggtgtactgctggtttgcatattgatttctgcatcgccgctcaccagctgcaagagaaaccatttttgtttttggccgatacaaaccggcttcgtgtcccaacgcaccaaacgtttcggtaatttgtagcgcaaccagttacgcgttgaagcaaggattcgaacgtctttgcggcttaatcctacttcttcaaacaattcacggtacatcgcctgctctgcggattctccggggttgattccgccttgcggaaattgccaggagtgctgaccaaatcgccgggcccacattacctgcccctggcgattacaaatcacgatacctacgtttgggcggtagccatcgtcatcaatcaccggactacctcaaaataaagctttatatacgaatgattgtttcatactccaggaagacggtaaaccactctctgcagggcattacacactaataacaattgaataactcacagttatgtgcagagttataaacagaggaaggggtggatagccgtttttattcaccttttctgtggatagagttgtgaagaactacggaattactacgggaaaacccggagcattctgaataagcccgatatagacattttaaaatattcattatcagtcaatgcattacatgtaattttagtaatgaaaaagagtaattcgtgacccaggtcacacctctcatttacgggttggcgaaagatcaaccaatgccgtatttatccacagaatgtgccactaagttaagcactgaaccactaaaaactggagtttcgtcgcacgtcaaggctgtaaatggaaacagtagtggaggtttttcacagttatcccagctttctgtggataacatggtgtaagatcctgtttattttcagtgaccagatttggaaaacccgttgcagtgttgcgcaactcgattaccggcaacctaaaaagcaatataaatcagagaattgaacaacgcatgtggaaaaagttacactgcgaatattcggcacataattgctgtttgttttttaatcaaggtatcatgacatgtcccaacctcgcccactgctctctcctcccgaaactgaagaacagttgttagcgcaagcacagcaactttctggttatacattgggagaactggcggcacttgtcgggctggttacgccagagaatttaaaacgcgataaaggctggattggcgtgttactggagatctggctaggtgccagcgcagggagtaaacctgagcaagattttgctgctctgggcgtggaacttaaaactatccctgtggatagtcttggtcgtccgctggaaacaacattcgtttgtgttgccccgttaacgggcaatagcggggtgacctgggaaaccagccacgtgcgccacaaactcaaacgcgtactgtggataccggttgaaggcgagcgcagcatcccgctggcgcagcgtcgcgttggatcaccgttgctgtggagcccgaatgaagaggaagaccggcagctacgcgaagactgggaagaattaatggatatgattgttctcggtcaggttgagcggattaccgctcgtcacggggagtatttacagatacgaccgaaagcagcgaatgcgaaagcgcttaccgaagccattggtgcccggggcgaacggattctgacgctgccacgcggcttttatttgaagaagaatttcaccagtgcactactggcccgtcattttctgatccagtagccatcgctttgacctgccgctttccgggcatataattaccgcttcatttttttggcagggctttttagatgttatttgcatggataaccgatcctaacgcctggcttgcgctcggtacgctgacgctgctggagatcgttcttgggatcgacaatattattttcctttctctggtggtggcaaagcttcccacagcacaacgtgctcatgcgcgccgtctggggttggcgggagccatggttatgcgtctggcgctgctggcatcaatcgcctgggttacgcgcctgacaaatccgctttttacaatattcagtcaggaaatttctgcccgtgatttgattctgcttctgggtggcttgttccttatctggaaagccagcaaggaaatccacgaatccattgaaggtgaagaagaagggctgaaaacacgcgtttcatcattcctcggcgctatcgtgcagattatgctgctggatattatctttagcctcgactcggtgattacggctgtgggtctgtcagatcacctgtttattatgatggcagccgtggtgattgccgtaggcgtgatgatgttcgccgcgcgctcgattggtgattttgtcgaacgccatccttcggtaaaaatgctggcgctctctttcctgattctggtgggctttaccctgattctggaaagtttcgacatccacgtaccgaaaggttacatctacttcgcgatgttcttctctattgcggttgaaagcctcaacttgattcgcaacaaaaagaatccgctctgatactccgtacgctctcctgcgggagggcgtactcactccttttaccctcacagtttaagattttcctgctttcaagatatataacgtcggtttataaacagactattatcataggtaggccaaatgaggataaccggatgaaaaaatgggcagtaataatttctgcagtcggactggcgtttgctgtttccgggtgttccagtgattacgtcatggcgaccaaagatggccgtatgattttgaccgatggaaaacctgaaattgatgatgataccgggctggtgagttatcacgatcagcaaggtaacgcgatgcaaattaaccgtgatgatgtttcgcaaattattgaacgttaacaaataaggtcagcatccggctggccttaagatttttctctttcccttttcccttccctctgccatttttatattccttatgtcgtgattataaaaaggaaacggctatgcaatatcaccgtataccccacagttcgctggaagtcagcacgctggggcttggcacgatgacgtttggtgaacagaacagcgaagccgacgcccacgcacaactcgactatgccgtcgctcagggcattaaccttatcgacgttgccgaaatgtacccagtacctccgcgccccgaaacgcaagggttaaccgaaacctacgtcggcaactggctggcgaaacatggcagccgcgaaaagttaattatcgcctccaaagtgagcggaccgtcgcgcaataatgacaagggcatccgcccggatcaggcgctggatcggaagaatatccgcgaagcgctgcatgacagcctcaagcgcctacagactgattacctcgatctttatcaggtgcactggccgcagcgcccgaccaactgcttcggcaaactcggttatagctggacggattctgcgcctgcggtttcgctgctggatacgctggacgcactggcagagtaccaacgcgcgggaaaaattcgttatatcggcgtgtcgaacgaaactgcatttggcgtaatgcgctacctgcatctggcggacaaacacgatctgccgcgtattgtcaccattcagaacccttacagtctgttaaaccgcagttttgaagtaggtctggcagaagtcagccagtatgaaggggtcgaactgctggcctattcgtgcctgggtttcggcacgctgaccgggaaatatctcaatggtgcaaaacccgctggcgcacgtaatacgctctttagtcggttcacccgctatagcggtgagcaaacgcaaaaagccgtcgcggcgtatgttgatatcgccagacgtcatggcctggaccctgctcagatggcgctcgcgtttgtacgccgtcaaccgtttgttgccagcactctgctgggcgcaaccacgatggatcagctgaaaactaacatcgaaagtttgcatctggagttaagcgaagacgtattagctgaaattgaagcggtgcatcaggtttatacttatccggcaccataagattaacgccggttaaaaccggcgttaaatattaatgacggcgctgccagatccacagcgccgttattgccagcgcaaacagcgcaccgaagccaatgccaatgggcacgaccgggatgcctatcattaccgccagcgagtaaatgcccagcatcaacaacatggcgctgttttcgccaaggttttgtactgcaatcgcattccccgccccgacgctttttttaccccgctcctgtagcaacgcattgagcggaacgacaaaaaagccccccatcacgccaatcagcatcaacaaggcataggctggcagcagctcgtgttgcagggaaaaaatcagtaccaccacgccaatcaaaatcccggctggcatacagcgtgacacggtttccagcgtaactaacttcgctgccgcacctgcgccaaccacgataccaatcgctaccatcgcgttgagataggtgggcgtagcgttatcggtaatgcccagcgccaccggtacccacagcaccaacaggaaacgcagcgtgacacccgctccccagaataaactggtgcccaccagcgaaaaacgcgtttcaccattgcgccatagcgaggtgcaggcattcaggaaactgcgggtcatgttgatgagattccaggactgccccggacgcgccgccgccagtttgggaatgtagatattggcaacgaccgcaccaccgtaggccagtgcgcatgcggccagggcgacgaggacatgccagtcagccagcacaccaccggctacggaaccgagcaaaatcgccgctatggtagaagcttccattaaaccgttagctttcactaacttactacccgtggttaattcgccgagaataccgtatttcgccggtgaataggctgcagcaccaacacccaccagcgtatagccgagaaacggattgataccaaagcagatactggctgcgcccagcagcttcaggccgttggcaaacatcatcacccggcctttggcgaagctatccgccacctgcccgacaaacggcgcaaaaagaatgtaagcacctacaaacaccatttgcaggatgggctggctccactccggatagaactgcgctttcagtaacgccagagtggcaaacagtagggcattatcgccaaacgcagagagaaactgcgccacgataaccgctttcatccccttcgaccacaacgaagtgttagtgtgcactgactcactcatcgtgttgttccgcttcgtctacccagcttttcaacgtgacaaagtcaggtttgccgctgccaagtaatggcatctgtttcagatagcgaatatcgcgcggtacagcaagctccggcacgccgtgctcgcgggcatactgttgcaacttatcgcgcgtcagttcgttatctgtggtgaaaagcaccagtgcctcgcctttgctggcatcgctcttaatcgcagtggcatggactttatctggcgaaacaccaagtgccagttgttccaccatttccagcgacaccatttcgcctgcaattttggcaaagcgttttgcgcggccctgaatctgcacaaagccctgctcgtcaaaacgcacaatatcgccagtgtcataccagccgcgctccatttcgccgcgaacattctcggcggtgggcacttccagtacacctggcttctccacccgcagatagccgttcattatgttcggccctttcagttgcaggcgtccgccctcttcgataccagggaccgacaacaggcgcgcatccattcctggtagaatacgccctaccgtaccgggtttcgccgccatcggtacgttgatagaaacgacaggcgcgcattcggtcacgccgtagccttcaaggatgcgcaggccaaatttatcctgccaaagctgtttggtactttcttgtaatttttctgcgcctgccaccacatagcgtagacgatagaagtcatacgggttggcgaaacgcgcgtagtgaccgaggaaagtcgaggtgccgaacaacacggtgcaactgcggtcatacaccaactccggcacaatgcggtaatgcagcgggcttggataaaggaacacttctgcacctgtaagcagtggcgtaaacaggcctaccgtcagcccaaaggagtgaaacagcggtaacgccgacataaagcgatcgttggtggtgaagtcggcaatcgttttaatctgctcgacattcgccagaatgcttttatggctatggacgacgcctttcggatggccttcagaaccggaggtaaaaaggatcagcgcctcttcttccggctgctgtttaacctgtgccagacgcggcatcagcaaatgagcgaagatccatactttgtcggcagtggtgacatctgcttttaaatcttccagatagacccagcgcacctgagtaagttgctccggcagatgccagagtttgcctttatcgagaaactggcgggaagtgaagatggttttgatttcagccgccgtaatagcactggtcagcccttttaccccggcagtgtagttcatcattgcgggcatgcggcgacgggcgatggccccaaaaatcactgccgcactgatgcctgcattgggcagcattaagccgatgcgttcgccttcaacactgtatttttcaaggatgcgtccaacaaacagcgttttcgtaagcaatttgcgataggagtctggggtaaagttgacgtcttcgacacatttcttcccggctccgaagcggtacattgcactcagtaaagattcgtacagcgtttcacgcgggcgcaccgccattcgcgcttccatcattatttgatgcagcatttcgccagcgattttgcgacggtcacgggcacgcggcgcatccggcatcgccacctgcgttggtggcaaaatatgcagagtaatttgcgggaacaagcgacgtttaaccagacctttcaggcggctgaagtgcgtaagttccgccccttcaatacgcacaggaataaccgttgcaccagacttcgccgcgacaaaacccgcgccatcgtagattttcatcagcgagcctgtcgtggtgatgcgtccttcagggaaaatcaccactggtcggccctgttccaccagacgtaccagatgtttaatagccataggttgcgtcgggtcgagaggaacaaagtcgataaatgatttcagccaacgcatataccactgttggcttattgaggtgtaaacggcaaacactggacgcacaggtaaaaacagtccaagcaaaatgccatcaataaaagagacgtgattaggcgtaattagaacgcgctcgcccttcagtgcctgggtgtcacccgtaacgcgaacgcgatacaaaacacggcacaaatttcgaaaaaagctaaaaagcattccaactccctttgctctgattcagtaaaagcgaatggagggagattacacgagataaagaacgcgagcgacagtaaattaggtgcgaaaaaaaacctgcgcatccgcgcaggttggtgcaagagacagggtacgaagagcgtaccgaataatctcaccaatcaatacctctgggatcttgattgtggtctgcacgacgactcttcgccagcgagaaaacgcaaaggaatgaagggaaatgcaacgaggtgtgtaaattgtcggttactgttacagattgatgaccggcaaaaaaaacctgcgcatctgcgcaggctggtgtaattcatgtgctcaacccgaagttgacttcacctatcaatacctctgggatcaccactttagcaacctgaagccaaacgccaccagcggtcaatcgcaacagcgtttcgcaaagtgtaaccaaaggtttgcaatctctttttttgtcttacttatttgcgtttggctcacattcccacgatgaaaacacgccaccccttgaaccaacgggcgttttccgtaacactgaaagaatgtaagcgtttacccactaaggtattttcatggcgaccataaaggatgtagcccgactggcaggcgtttcagtcgccaccgtttcccgcgtcattaataattcacccaaagccagcgaagcttcccggctggctgtgcatagtgcaatggagtctcttagctatcacccgaacgccaacgcccgtgcgctggcgcagcagaccactgaaacggtcggtctggtcgttggtgatgtttccgatccgtttttcggtgcaatggtgaaagcggtcgaacaggtggcttatcacaccggtaattttttattgattggcaacggttaccacaacgaacaaaaagagcgtcaggccattgagcaactgatccgccatcgctgtgctgcgttggtcgtccatgccaaaatgatcccggatgctgatttagcctcattaatgaaacaaatgcccggtatggtgctgatcaaccgtatcctgcctggctttgaaaaccgttgtattgctctggacgatcgttacggtgcctggctggcaacgcgtcatttaattcagcaaggtcatacccgcattggttatctgtgctctaaccactctatttctgacgccgaagatcgtctgcaagggtattacgatgcccttgctgaaagtggtattgcggccaatgaccggctggtgacatttggcgaaccagacgaaagcggcggcgaacaggcaatgaccgagcttttgggacgaggaagaaatttcactgcggtagcctgttataacgattcaatggcggcgggtgcgatgggcgttctcaatgataatggtattgatgtaccgggtgagatttcgttaattggctttgatgatgtgctggtgtcacgctatgtgcgtccgcgcctgaccaccgtgcgttacccaatcgtgacgatggcgacccaggctgccgaactggctttggcgctggcggataatcgccctctcccggaaatcactaatgtctttagtccgacgctggtacgtcgtcattcagtgtcaactccgtcgctggaggcaagtcatcatgcaaccagcgactaaccgcagttaaagcaattccagcgccagtaattcttcgatggtctggcgacggcgaatcaaccgcgcctgaccattatcaaacagaacttctggtaacagcggacggctattgtagttggatgacattgatgcgccatatgcccctgtatcatgcagtaccagataatcacctgccttcacttccggcaaggcgcgggtttcaacatttcccccttcctgctgggtaaagacatcgcccgattcacataacggtccggcgacgacggtttccaccgttggcgcgtgttccagagaacgaccatcagctgccagggcactgatatggtggtaactaccgtacattgccgggcgcatcagatcgttgaacccggcatcaaccagcacaaagtggcggctccccatttgtttgacgctccgcacctgagtaattaatacgccagactgcgctaccaggaagcgacccggttcaatttccagtttcacagggtggcccaaatggcgggcgatttgctcacgcgcggcattccacagaccataataatgttcggtatcaaccgcctcttcaccctgttgataaggaacagaaagcccaccgcccgcagaaatagcctgtaaatcctgaccgaattcgatgacctgacgcaccatagcaccacacacctgttccagatgggcataatcaacgccagaaccaatgtgcatgtgaatgccgaccagctgcagatgatgacgttgtatcacgtccagtgcggcgggcagatcggtgtaccagataccgtgcttgctgttttcgccaccggtattggttttttggctatgtccgtgaccaaaccccggattaacgcgcagccatacccgatgccctggcgaaacctggcccagttggtcgagcatatcaacagaacccgcattcaccggaatttgcaattcactgacgcgttcaagcgtcgcctgatcgataacatctgccgtaaaaacaatatcatcggggtgcgtttgcggattgtaacccgccgccaacgcacgctctatttcgcctaacgagacggaatccactttcacgccctgctcacgcattaagcgcaaaatatgaatattggaacaggctttctgtgcaaagcgcaccacatcaaactgtttcagcgctgcaatctgccgacgaataatttgcgcatcgtagacccacaccgggcagccaaattcagcgggcaaacgcagcagattttcggcggtgagatcggtatcggtgctgaacagtgaatgtggcataacaaactccagataagtgcttttttatgattacgccacatcataaaaagaataaaaaatatcgatttatgtcgagtctatgcaaaaatgatatggattaccggattgcgagagagcgctaatggccgccgttaacttacgtcatattgaaatttttcatgcggtaatgaccgccggaagcctgactgaggcggcacacctgctacacacctcacagccaaccgtcagccgcgaacttgcgcgctttgagaaggtgatcgggctgaaattgtttgagcgcgtacgtgggcgattacatcctaccgtgcaaggactgcgtctgtttgaagaagtgcaacgatcctggtacggactggatcgcattgtcagcgccgcagaaagtctgcgcgagtttcgccagggagaactgtctattgcctgcctgccggtcttttcgcaatcttttttaccgcagctcctgcaaccctttctggcacgttatcccgatgtcagcttaaatatcgtgccccaggaatcaccgctacttgaagagtggctctcggcccagcgtcatgatttaggactcactgaaacgctccatacgcctgcgggaacagaacgtaccgaattactctctttagatgaagtgtgtgtgttacctccgggtcatccgctggcggtaaaaaaggtattaacgccggatgattttcagggtgagaactacatcagcctttcccgtactgacagctatcgccagttgctggatcagctatttactgaacatcaggttaaacgacgcatgatcgtagaaacccacagcgccgcgtcagtctgcgcaatggtacgggcgggggtaggtatttcggtggttaacccgctcaccgcactagattatgcggcaagcggtttagtggtgcggcggttcagtattgcggttccgttcaccgtcagcctgatccgccccctgcaccgcccgtcatcagcgctggttcaggcgtttagtgggcatttacaagcggggttaccgaaactggtcacttctcttgacgctattttgtcgtcagctacgacagcataaaagcgacagcatcctcggcatggatcgccgcggtatcaaacacaggcaaaacactgcgctcttctggcaccagtaaaccaatttctgtgcagccaaaaatgacgccctgtgcgccctgttctgcaaggcgagcaatcacttgcgcacaataagcgcgtgacgcttcggtaaattgccccagacacagttcttcaaaaataatctgattaattttcgcccgttcatccgcttcaggaataagacaattgatggaaaattgttccgtcagccgcccgcgataaaaatcctgttccatggtgtaacgcgtacccagcagcgccacacgagtcattccggccccggtaattgcacgtccggtggcatccgcaatgtgtaagaaaggcagagtgcaacgtgactcaatggcatccgccactttatgcatcgtattggtacatagcacaataccttctgcgcccgcccgctgtaagccaagcgccgcctcagccagaatgtccccggttttatcccattccccgcgacgctggcactcttctatttcatgaaaatcgacgctatgtagcagcacttgcgcagagtgaagcccaccaagccgctgtttaatgccttcatttatcaaacgatagtaaggaatggtggattcccagctcattcctcccagcaaaccaattgttttcattcctctctcctgatgtgtgttaccgcaacaaggctgaataaggaacgagacaaacgcctcaacggccaagtgcccaatctctattaacgaaaaaagggccggatgtacagcacatccggcccgtgaaatcagacgccgatatttctcaacttctcgcctgccatcagtttgcgttcgatatgttccagcgtgacatttttggtttccggaatgagccagaaagtaatgcccacaaacgcaatgttcagcgcagtgtagagccagaacgtaccggcagcgccaatgctatcaagcagtgtcaggaaggtcgcgccgataatcatattcgacacccagttcgtggtggtcgaacaggtaataccgaaatcgcggcatttcagcggctgaatttcagagcacaggatccacaccactggcgcggcgctcatcgcataaccggcaatacacatcatcgtcatgccaacagagagccaggacaagccactggaagccgtaccgttatcaaactgcatcaggcaatagcccagcaccagagtgcctaacgccatcacgctgaaaccaattttcagagccggtttacgccctgctttatctaccgtaaacaccgcaataaaggtggcgaacataaaggtcagccctacgaccagagtcgcaatcatctgttgttctgtggtcgtaaagcccgccattttgaagatacgcggcgcgtagtacatgatgatgttcataccggtaaactgctgcatcgcctgcaacaacataccgagaaacacagcacgacggacgttacggttgatcttaaacagtgcccaaccgccctgttttaacttcaggctttcacgaatttcgttgagttcttctcgcgctttttccgacgtatcgcgcagcatacgcaatacttcttccgcctcaatatgacgccccttttccgccagccagcgcgggctatttggcaggaagactaccagaataatcagcagaactgctggtaaagcaagaacccccaacattgcgcgccagttaccgctataactgaacgctgtatcggataaaaacgccagcacgatgccgagtgtgaccatcaactggtacatactgatcatcttaccgcgaacgttttcacttgccatttcagaaagatacagaggagcggtgtaagacgcgatcccgacagcaatgcccagcaccacacgagcggcgattaacatctctacgctggtcgcaaaagcggaccctatagaaccgagtacaaacaggatggcccccgccatcaggctgtatttacgccccaggcggaacgacagccaaccattaaacagcgcaccaattgctgcaccgagcatcatgctactaaccacccattcctgcaaacgactggtcagcacaaagtgatcggtaatgaacggcaacgctccggcgattacgccgatatcaagaccaaataacaatcctgcgaccgcagcagctaccgaaacaaacatattcatacgccgcgtatcccgcaaagaacgtggcgttaaagcagattccgtattgatagtaaccattttttcctgccagcagagagtaagacatagtgaaaaaatacgtgaacaactcacgcaggtgtcaggtcggaaacagcataaatatggattaaattgctgcgacatgtcgttatgtgatggatattccaattttcaaattaagttgaattattgagattattattaaccacctaattttacagcagataaaattcataaagttcattaattgataattaatatggattatttcataaccatgatatggattatgatgatctacaggtataaaaaaccctgccatgcggcagggtcataaaagtaagaagaatgaattaacgcgccagccaaccgccatccacggcaatggtataaccattcacataatctgaagcgctggaggcaaggaacactatcggccccatcaggtcactcggcagtccccaacgaccagctggaatgcggtcgagaatttccgcgctacgttgttcatctgcccgtagttgttgagtattgttggtcgccatgtaacccggggctatcgcattaacattaatgttgtgtttagcccattcgttcgccatcaatcgcgtcacacccatcacgccgctttttgatgcggtataagaaggcacacggatcccgccctggaaggagagcattgacgcgatattgataatcttgccgccattgccttgcgcgataaagtgtttcgccgctgcctgagacatgaagaatacgctcttgatattcaggttcatgacatcgtcccagtccttttcgctgaactcgagagcatcttcgcggcgaatcaatccggcgttattcaccaggatatcaatatgaccaaactccgctaccgcgcgatccagcagtgctggaataccatcaatctttcgcagatcggcggtcaggcttaaaaaacgacgccccagcgctgtgacctgctcgatggtttcagtcggttcaacgatgttaatgccaacaatgtcacagcccgcttgcgccagccccaacgccatcccctgacccagtccagtatcacaaccagtgacgaccgcaactttaccttcgagagaaaatgcacttaaaatcataacaataccttattcgtttatgcccacaactagcgcaaatctttaacggccacatggtccatatcatcaaagacctggttttcaccgaccatgccccagataaaggtataagctttggttccgacaccggaatggatcgaccagctcggggagatcaccgcctgctcgttatgcatcacaatatgacgcgtttcttgcggctgccccatcatgtggaaaacgcaggcgtcatcatccatattgaaatagaaataaacttccatccggcgctcgtgggtgtgacacggcatggtgttccacaagttacccggagccagctccgtcagccccatactcaattggcaggtttccagtacatccgggacaaaatatttgttaatcgtgcgacggttactggtgaggttatcgcctaacgtgactggagatacttcgtccggtgtgacttttttggtgggatacgtcgtatgcgcgggtgcgcaattgtaataaaacttcgccggagtgccggtatcaatactggcaaagacaacttcttttgcacctttaccaacatacagggcgtcgcggtgaccgatttcatagcattggccatcgacagtaatcgtaccggcaccgccaatattgataacacctaactcgcgacgttcaaggaaatagcttacgccgagttgtttaccaacttccccgccaacggaaaccgttttagttatcggcataatgccgccaacaataattcggtcaatgtggctgtaaaccatggtgtactcatcggcgacaaataccttttcaaccaaaaattcattgcgcagcccttgggtatccagcgtttttgcgtgcgcactgtggatgctctgtcttacgtccacatcaacctccgataatcagtgaagcgtgaaaatagaaaacgatagtgaaacactgtttcgttttctctataaagggatgatatgcccatgggctagggttttcaattaaaaataaaacaatgtttcatttttaagttaaggattaaaaaaagtgcagtgtcgatcacgaatatgtcatgagaatggaaaaatgagggagcccagaaaatgtatgtcgacttgccagccatcattattcaacagattaatgacggcagatatttatcggtaaggaggaaatgcagagctattcgtcacgttcaatggtcaatgccacaccctggcccccgccgatacaaagcgttgccagtcctttgcgggcattacgtttcaccatttcatgaaccagagaaaccaggattcggcaaccggaagcgcctatcgggtgaccgagtgcgatcgcgccaccattgacattgacccgacgctcatcccactcaagcatcttgccaaccgaaagcgcctgtgcagcaaacgcttcattagcctcgataagatcgacttcagccaactgccagcctacacgctccaggcaacggcgggtcgcatacaccggcgcaattcccatcaatgccggatctacaccaacgctggcaaatgcgcgaatgcgggccagcacgggtaaattcaacgctcgtgctttggcttcgctcatcatcattaccgcagctgcgccatcgtttatggatgatgcattacccgctgtcacagaaccgagactatcaaatgaaggatttaaacgggctaagccttctgcgctggcgtcagtgcgtggctgttcatcggtatcaacaaccaacgtctgcccgttactttgggtcattaccgggacgatctcatctttaaatcgtccggcgtcaatcgccgctcgcgctttttgttgcgagctaagtgcgtaagcatcctgcaactgacggctgatgccatattcgcgagccagattttcggcggtgacaccaatatgataatcattgaaggcatcccacaacccatcatgcacaagactgtcaaccaactggctattgccaagctgtgcaccggtgcggctatcagtcagaacatgtggtgcgcggctcatgttttcctggccaccggcgatgacaatatcagcctcgccacactgtatcgcctgagtagccagatgcagtgctttaagcccggaaccgcaaacgtcattaatagtgattgcagaaacgctattaggcagaccacctttaatagccgattgccttgccggattctgccctgcccctgcagtcaacacctgaccaagaattacttcatccaccgcatatgcaggaacgccggtacgttctattaacgctttcacgaccagactaccaagttccacggcggaatgacccgctaacgcaccacgaaagcagccgataggtgtccgtaacgccccgacaatcacaacgtctttcatcacaacctcgcaccaattaacagtgcaatagtaaatgattgttaattacagttatcttaattgtttaaaaaaagtgatttttatcacaaaggaaatatgcctgagcagcagtcagagacataactggcacgtaaggtttgcaaccactaacccaccaatagaggggtagatagggcgttaatctcccatacttaacctggtttatggtaaattgccctccattttgtttaatttgtagatgatacgttcagataatgtctaatatttggtctaaagaagaaactctgtggagtttcgcgctctacggcacagccgttggtgcaggcacgctcttccttcctattcagttaggttcggcaggggctgtggtcctgtttattactgctctggtcgcctggcctttaacatattggccacataaagccttgtgccagttcatcctctcatcaaaaacatcagcaggtgaagggataacgggcgcggtaacacactactatggcaagaagattggtaatctgattaccacgctgtacttcatcgccttttttgtcgtcgtgttgatatatgcagtggcaattaccaactcacttacggaacagctggcaaagcatatggttattgatcttcgcatccgtatgttggtgagtctgggtgttgtattaattctgaatctcatttttctgatgggacgtcatgccactattcgggtaatgggatttttggtattcccattgattgcctatttcttatttctttccatttaccttgtcggtagttggcaacctgatctattaacaacccaggtagagttcaatcagaatacccttcaccagatatggatatcgattcccgtgatggttttcgcctttagccatacgcccattatttctacgtttgccatagacagacgtgaaaaatatggcgaacacgctatggataaatgcaaaaaaattatgaaagtcgcttatctcatcatctgcataagtgtactgttctttgtctttagctgcctgctttctattccaccttcgtatattgaagctgctaaagaagaaggggtcaccattttatcggcgctttctatgctgccgaacgccccagcatggttgtcaatttccgggattattgtcgcagtagttgcgatgtcgaaatcattcctgggtacgtactttggcgttattgaaggtgccacagaggtcgtcaaaacaacactacagcaggttggtgtaaagaaaagtcgtgcatttaaccgcgcactatcaattatgttggtatcgctgattaccttcattgtttgttgcattaacccgaacgcgatttcgatgatttacgcgatcagcggcccgctcattgccatgatacttttcatcatgcctacgctgtcaacgtatctcatcccggcgcttaaaccctggcgttccatcggaaatctgattacgctgatcgtgggtatcctgtgcgtatcggtaatgttctttagctaatatcagttgtggatggttcaaaattgctacaattttgaaccattccatttttcataatattcatttgttattattccaccctatcacttctctcgtcatatcctagtattatcagttagttaaacacacaaagagatctgaacatcttaaataagactatttaagatgcataacttagattcgcaagatatcttctggtcattcaaaaacaatttgcgatatagatattcttataccatgagatagttatctggaccgctctcaaccatgcaagattaaatcagtgaaacataatcatatttgataacgagaaatgcatttttaaatgccttactcagaattatagcaaatacagattaatcgcaatttttcccggcaaaattacaaaatcatggtgtattgacatcatcaataaccaatgaaattatgcaattatatacggatagggaggttcttaacatggggctttgtagtcgttataaaagtcttacatgcaatagttgctcaatgcattgccaaataatgccagaagagtcaccgcgtttgcagtattgcgcaaactcgtgtttttgtatgtggcccgaagaaagttcatattttaatcgtggtgtggtagaaggtatcttaacaaaaaaccacaatgcgagattaagcggatatatttttgtcgatttttcagtaagttttttacgtctattccttgaaaaagactggattgactatcttgcaagtactgacatggggattgttttagtcagcgaccgcaatatgcaatcgttagctaattactggcgaaaacacaactcagcaatatctgctgtcatatataatgatgatggtcttgatgttgccaatgaaaagatcagacaactatttattggtcgttatttatcatttaccggaggtaacacattaactcagatggaattcaccataatggggtatatggtttctggttataatccatatcagattgctgaagttctggatatggatatccgtagcatctacgcgtacaagcaacgaatcgaaaagagaatgggtggtaaaataaacgaattatttattcgttcacattcggtccaacattgatactcaacgaccagccagaatcatactctgtttatacgggcatttattgaaatgtccgtattttataaataggccgtcccctcaagagtaaacaccatagtatttaaaaccatcacacgaaaaattcagaagcattacgaaatatgaatttacaaacaatagtggcataaatgttaaccatgttaatttacgtaaagttttacgttgcaacattaaagcctcatttcaatcatcatgataaatataaaattaatatatatttatgccgtaaataccaatatacttagcaaactatgtgatctccatttcgattgatttagtgtttattgacgtatgtactggattattaacgataatatcgagttctggcctgagcaccgaaaattaatatcggtacataacgccgatcttaacgtcgttctgacaacgccagccagtcgatgtttatcacttctacttgaagcttttcctgatgtggttgcacaacaagattttttcaccagagtctgggaagaagaaggtatgcgtgtgcctactaacacgttatatcagaacatatccattatcagacgcggatttcgcgctgttggtgatactacccactcgctaattgcaaccgtgccgagaagaggattcaagatccataatgacattaacatacaaaatcatgtaataaactcgtcaacagacgcacatacacacaatgccccacctgccataaaagttaatgcgggatacaaagagagcattggtggcgcaaagaatttcaataacaaaatcctcaaacatataaaaagtcatctaattatgttgagcgcatttgtcataggcgcatattctgcatattggctatggaataataatcaaccgaagccatttttcaaggattacaagactgttgcggaaattaatggctgccattttaatgtaacagaagatacaattgatgggttgaaagagttcgataaatataaaacacggatactggattcggggattaactgtaaaaaacatccgtggttatacttccctcttgcaaaatcctcaccggggatgattgttatggcatgcaataaaaactataaccaacatgaagtggcaaactgtttaaccctgtcttaccgtgaggttaatcgtgattgattataaaaaaaacttattatttattttagtttttatcagtgggtttattctcttcactgtctattcttacactgcagaaaaaatgatatataacgaaacatgcactgcaaattgggtaatttttaatgaccagggacgagcaaatcttaccatcgactttatgtataacaaaaaaaataaaacaggaactgttgcgttgagtggaacctggcaacaaggtaacagagaaagtaaatcaatacggcgaaatattgaatacacatggattgaaaactatgacacagcccatttaacatcaaagaaagttaataagtttgagattatggatcaagttgatgatgatagacttgcacaacttattcctgatttttatgtctttccagaaaaaagtgtaagctataatatactaaagcaaggtaagcatgcttttattttgagcattggtaacagagcaataatgcattgtgcaaggtaaactaaaatagataacaaaaagatggaacctcgttaatcataaaacaataaaattaaatattctcgcagtatatggcagtctaaagcatcaaagatttgatcaacatctttcattttagacatctccttgcaatgtaaaatatcatgtatcaacaacatctggtgcaaatccatgagtcgaactcgacattcatcttagctcgattattattccttcgtacagtcgatgtaaacaatacagaaagaggattattaagaaccagtttactcagtgaatcaatagaggaaaggactaacgtttctttaaaagaattgatttcatcatctgttaaactaaactcatcattgacagatcgtgagatataactgtttttaactttactctttacgttgactttattgacagaattaacattcacatatcttgaatttaatgtccatgatgttgtttgcgtgagaacattctcagcattaaggaatttttttaacggaatccttggtttctttttcgagtccgaatttacaatatcatgcatatagaccatttcatgaatctgcgaaaattcaatgtccattgtatacctcacatttttaccgtgactcgatgttactgttcaataatcaccttccatcaatactaaaattaatacccctaatgtgccgataacaaatatagtcattctacgtaacgtctccataaggtgatatttgacattatcagaagctgcgaattcggattttgctctaatcaaatgagagaaatgtaaaatgaagccacgaaatattaataatagcctaccactgcaaccattagttcctgatcaggagaacaaaaataagaaaaatgaagagaaatccgttaatccagttaaaatcacaatggggtctggtttaaattatattgaacaagaatctcttggaggaaaatatctaacacatgatttgtcaataaagatagcggatatttctgaagagataattcagcaagcaatattatctgctatgagcatatataaattttcgataacagatgatttaatgagtatggctgtaaatgaactcataaaactgaccaaaatagagaataatgtagacctgaataaattcactactatatgcacagacgttctatccccccgcgtcaccagacataataaagaaaaaaacaaacgacattctacccttctcaaaaatcccctttttaattttcattgaaaaaatggcaattgatactatgaatccaggtcatacacattaaggcatttatgtaatgtcgtaattaagataactaataaggtgaatattagtaaaacaactaatgatgttattagtttgtagtgaacagtacttttaccaataatgaaaaatataccataagcaatgcaagcttaaaactcataatttaaaaaagataaatataaaaatatcaatgagtcaatcaataataatttggcatcacgagacacatcacagaggaatattatgagcacagaaacaattgaaatattcaataatagtgatgaatgggcaaatcaactaaaacacgcattatcgaaaggagaaaatctggcattactacatggtttaactcctgatatccttgatagaatatatgcatatgcattcgactaccatgaaaagggtaatataacggacgcagaaatttattataaattcttgtgcatttatgcgttcgaaaatcatgagtatctaaaagattttgcatcagtatgtcagcccaaaaagaaatatcaacaagcatatgacctttacaaactaagttacaattacttcccgtatgatgactattcagttatttatcgtatgggtcaatgtcagattggggctaaaaatatcgataacgcaatgcaatgtttctatcacattattaacaattgtgaggatgatagtgttaagagtaaagcgcaggcatatattgaactcttaaacgataattcagaagataatggctaagcattacaatcatttggttaaatttgctggttatagtgcagttaaccactataaccagcacctcttatgttttcttaaatcagcatcttaaaacagttaagagcatactataaatcattatttttcaatgcgttagagaacaatctactttatcaaaattgaataaggctatttcagattacatcactgaattcctaagataaattagtgaacacaaccatagatatgtcaaatgtaatttcctgtagcgttaatgacacataaatatgaatagccataatttctattgcttaagcaggatgcaagaaaccaattttttcatagaggttaactaatggacttagaaaataaattctcatatcattttcttgagggattaacgctcacggaagatggaattcttactcaaggaaatgagcaagtttatattccacagaaagagttaggtgtattaatagtattacttgaatccgctggtcatgttgtactgaaagatatgatcatcgaatcagtatggaaaaatattattgttagtgacgagtccctgacaagatgtatctattctttgcgctgcatttttgaaaaaattggctatgatcgttgcatagaaacaatctaccggaaaggttatcgtttcagcgggcaggttttcaaaactaaaattaatgaagataatacttcagactattccatagctatattccctttcactacttcattgaatacactggatccattaatacttaatcaggaattagtgcaaatcatttcaaataaaaaaatcgatggtctctatacctatccgatggctgcgacaaatttttgtaatgatcacatatctcaaaattcattcttgagcagattcaagccagattatttcgttacaggaagaataaaccagaataatgcagtgaacactttatacattgagttgatcgacgctaaaaaccttttcctcatcgccagtaatcatctccctgttgatgaactacataatacatcacaatttattatagataatatccttcaaacggtacataaaccagaacgatctgtaagattagctaagcaggaccaaggatataagaatcattatttatcagatgaaatgttagccggaaagaaagaactttacgacttcacccctgaaagcatttacagggccatgactatatttgatagattacaaaataaaagtgatatacagacgctaaaaacagaatgttattgccttctagcggaatgccatatgtctttggcacttcatggaaaaagtgaacttgaacttgctgctcaaaaagcattagagcttttagattatgtatcagacataaccactgtcgatggaaaaattttagctattatgggactgataactggtctgtctggacaagcaaaagtatctcatatcttatttgaacaggctaagatacactcaactgatatagcctctctctactactatagggcactagtccactttcataatgaaaaaattgaagaggcaaggatttgtatagacaaatcactacaactcgaacccagaagacgaaaagcagttgtgataaaagaatgtgtagatatgtatgtgcctaacccgctcaaaaacaacattaaactctactataaagaaactgagagtgaaagccatcgagttataattgacaacattttgaaattaaagcagctgacgagaatttgtatgcgataaatttttattgacgcaattttattatttagatgtatgcaacttgttatttaaacaacagagataaaaatatctaagatattcaccttattgcaagatatttaaaatgctctagagttaaaagtatgatgtaaagaccattggcctggacaattaaaaaagggagctttatgactaatccaatcggtatcaataatttatctcaaagttcaaatatagcgaatgcaacgggtgatgaagtcgtatcattagataaacacatcaacaccagtgctactgatacagatcaaatacaagcatttatagtttcaacatggatggcgccttttcaaaatgatatgtattcagaagataatcctatctcaccttactataaaattgagtggtagacgattgaccaaataaatcataacgagatacttttataatagtatctcgttcctttcattcaatcctcacacatgaaaaaatatgcgctcaccaaaagttaaattcttaaccatcttcacgttttgtatatttattacaaaaatgtctttcgccagcaactcttgctctaatgaagcaggaacaatgttcagaatcgaaccaaatttaattaaagctatcgctcttgttgaaagcaatctaaaaaaggatagcataggcaagaacagagataagaataacaatataaagagtttagattattggttaatgcagataaaccagatgcatattcccctgttaaaaaaacgtggaataataaaagatgaacgagatttgttagataacccttgtctgaacattaaaataggaaccgagattttatataaccatttttcacgttgtggagtaacgtggcaatgcctggggacttataatgcgggttttgcaatggataaccaaaaaaagagacagcaatatgccccaaaatatatattgtatataccaggcttaatgaactagacaatcgtaaggcttcagcaaaatgagcctaaagcctcttttttttatatagtgcaaacacccatacgtaaagctgttttgatcaactcgataccactgtgaacatctaatttcttcatgatattgagtctatgagtttcgactgttttcctgcttaactgcaagaaattagcgatttctttgtttgttttaccatcagctatgagttgtaatatttctgactcacgatttgtaagttgattatcagaggaatacctggaagatattttttcacaatccatatgtacactatcaaaataagtgtaaccattactaatcgaatcaatagcacgatttagtttcgccgggtgactggttttccatacgcatcctttcgcacctgcttcaagcaattttattgaatcaatatacggcatctttgctacaaatgtaataatatgagcatctatcttatgcgatttaacccattttacgagttcggcccccatcattccacctgcaaattctcctaaaataaatatttaggctgtagatttgttacactccgctatagctttcttcagatctttatagcccccaacaacctcatataaatcaggataatgtccgagaaatccaattatcccatcaatcataaacggctgctgatctgaaactacaattttaatttttcccatatattcatcctgagtgtaaatgctttaacgcattcatttataatcatcccttccattattattataagcaaaatccaaagaatacattgatgaaataataatgaaatataattaaaaataaaatttttgcgtaaaaaaataccacaggcattaaaaaatcatgagatgattaaaatattacaattagattatattcaaatcattaaacttgagccagggagctataagtcctcagggcttgccaaaacagaattattcatatccaaagaatgtgtttcaaacattttttcaactaaataatgtctggcttgttcgcagatttcgttaaccttgtcaggggagaaacaatgattattaattaaatattgctcacaattatccacaaattcctgcggactaaattcagcaataaattgatcggtaaaaaacacaaaacgcttatcatcatgaaatgtaatatggacattccatattgatttgtcgacaaaatatgactctacttcaagagacttatctttgaaactggtaggtatatggagatttacaggacctgatattgatggtaattttgttacccaactttcaaaaattttgataaaaacatcaacttcttctgaaggttttaacaatatactcttcagatcgtttatcatgtttattcttttttttcaagttctgagcatagcaagcttatcaagggtataaaattatccatctcatcaataatgccttttgtatagccatcataataaccttgaataaatttttcttctctcttttcctcaatactctgaatttttgcggtggtttcaagaaggattttttctttaagagaaactatttctttcaatccatcagaaatttttcttttaatcacaacaccatttgcaggagattttatcaagctcatctctattttttttcgcataaaatgtaattctctctaaaagtgttgatgcaagtggtaacggcgattgtatgtggtcaacaaaatcaggaaataataaattaaatcgttgctgcattgccaatggttgttgccttatatagggtaacaacgttgaaaaaccacatgtgatgatattgtgatagttagcgatgccgggtttgtatcgtgccttttcatttatttccagcggtatagctgataaataatcccttagtacatcaggaaccttataaaaaaacccgcgttctgcaaacctttctcgataaaagtgacaaccactgagtaaacagatcaatggaagtaaattccaattgtttattggatttgcccctatatttccagacatctgttatcacttaacccattacaagcccgctgccgcagatattcccgtggcgagcgataacccagcgcactatgcggatgccattcgttataatgctcgaacgcctctgcaaggttctttgctgccgttaacccgtctggtttgggcatgatactgatgtagtcacgctttatcgttttcacgaagctctctgctattccgttactctccggactccgcaccgccgtgttcttcggttcaagtcccaacatccgggcgaactggcgtgtttcattagcccggtagcatgaaccattatccgtcagccactccactggagacgacggaagatcgttgccgaagcggcgttccaccgctcccagcatgacgtcctgtactgtttcactgttgaagccgccggtagtgaccgcccagtgcagtgcctcacgatcacagcagtccagcgcgaacgtgacacgcagtctctctccgttatcacagcagaactcgaacccgtcagagcaccatcgctgattgctttctttcacggccactctgcctgtatgtgcccgtttcgatggcggtacagcaggttttcgctcaagcaacagcgcattctggcgcatgatccggtaaacacgtttggcattgatcgcaggcataccatcaagttctgcctgtctgcgaagcagcgcccatacccgacgataaccatacgttggcagctctccgataacatggtgtatacggagaagcacatccgtatcatcagtgtgacgactgcggcggccatccatccagtcatcggttcgtctgagaatgacgtgcaactgcgcacgcgacacccggagacaacggctgactaagcttactccccatccccgggcaataagggcgcgtgcgctatccacttttttgcccgtccatattcaacggcttctttgaggagttcattttccatcgttttcttgccgagcaggcgctggagttctttaatctgcttcatggcggcagcaagttcagaggcaggaacaacctgttctccggcggcgacagcagtaagacttccttcctggtattgcttacgccagagaaataactggctggctgctacaccatgttgccgggcaacgagggagaccgtcatccccggttcaaagctctgctgaacaattgcgatcttttcctgtgtggtacgccgtctgcgtttctccggccctaagacatcaatcatctgttctccaatgactagtctaaaaactagtattaagactatcacttatttaagtgatattggttgtctggagattcagggggccagtctaaacttgctcttttcttctggtgtttatctttgaaagatttgtaggataaataacattaagtaaagccgcatcggcttctctgtaatgtttatctttttccagataacctggggattctccccctaaatcaagctgtaacgttattctttcataacctttatctatgaggtggttcaacctcgttgttgaaagagtttcatccagttcattgactttagcttcgcgtagtaaatcagagacaaaaacagagtctttcttcgagagtaggtttgacaaacgttccagtccagaggtcaccagtgcaacggaagatgtgtttaatcgggcatcttcttcccatgctcaggaatcttccataacatagaaattggctttatccagataagcaatcagcagcgcaaccgactttaatcggtcacctttttgccaatcttcagcgttaatagtaccagtgttgattgcttgtataaggagatcaaggtaaagacctaaagcatcattttgtttatggttccacagctgcggcttgccttcttcctgcacatctgccatcacgggggagttgctgtcaaatcggatatgcacagcattcatttgcacgggaattccatccagtcgttttgggttgctaatgacgtcctgcatccgcttaatctggtcgggcgtagacatataatcccacagggtgagcagaaccttttttgcggctacactatttccctgatctgatactaatgccatatagccccataaactatccctcaaccagacagcatcatagtgggtttctgccgctgttttgtcatcttcgaaagtagaagcaagaataaacgttccccagggtttctccgtcaacgttaactttcgtgtgttttctgttaatgttagcaatccttgaatttcgtctttggtatagtggctctttatttcattttgtaatttggctgagtgaatcagaagacgataattaggatacttatctggatttaacgataaataacttttatctgttgctgcccccgtggaattaagaatgttaaatacagattcactcgtcacttctgcccctgtcgcctggcatgtgccgcacgaaaatataccagcgagcagaagagttaatgcagatttccctttcataaaatattccatcaatcgtttgttaaaagcgtagataaccacttatttaacaacttgaaaataaggtgttttacctgggttgttacaaaaggattgcattgcgtaaacgctttttatttacaacaaaatggggaagtattacggcgaagataaattggagcgggcgaagggaatcgaaccctcgtatagagcttgggaagctctcgttctaccattgaactacgcccgcttcgagatgcgtaaggcattataaaccttacgctctccttagcaagtgccacgctgctgactgctgattaattcgccatcagcattttggcttgctgccctgaggcggcaagtaacgtagcggatcaattgccgttgcacggtaacgaatctggaaatgcaggcgaacagatgccgcatccgtgctccccatagtggcgattttttgcccagccttcacgctttgcccattatttaccagcatcgtgtcattatgggcgtaagccgtaatgtaatcttcactgtgtttaatcatgatgagattaccgtagccacgcagctggttgcccacatacaccacctttcctgcacccgcggcgtaaataggtgtaccccgtggagctgagatatcaatccctttattgccgccatctgctgtcgaatacggcatgataactttccctgtcgttggccataaccaacaacgttgccctactggcggccaggatgatttcggtaccgctgatgacggtgtaaccgatgcggttttggtcgttgatttggcggttgatttacgtgtaatactgctacttttcgccccacccagttttagtttctgaccaacttcaatggtgtaagggggggaaatgccgttcagtcgcgccagttcttttacgctggttcccgtggtgcgcgaaatacgatatagcgtatccccccgtttcacggtgtaaacggagccggaatacgttcctgtatcggatgatttgctacccgaacagcccgccaaaagcagtccaaccgataacaacatcacgatacccagagattttttattcaggcgtcccgcactcaaaatctttcctcgcttaaaaaacaagacgccttatcatagcagccagcctcttgatacccaatctcttgcttctggaaaaacgtggtaatagagaaagaggttaatttcatttggcaaagggaagtatcatcagcaaaatattcgctgtagaggtatcgaacttcctgactttttaccctatttcccatcctgatgcgtaataatcccaatttatcacattgattttatcgccactcatattgatacgtatcactgcccctattcagagtcctgtttcgtatcatatctgtgtttttttaacgtcatcacacttcctacctcccctaacgcttatcgtcgtttctggcgtaaatcttgcctgcttagactaaatctttgccataagaaccaaatgttcaaatcgaggggatttctatggaagcgcgggaagcaaccgctacgggtgaatcatgcatgcgcgtcgatgccattgctaaggtcaccgggcgggcacgatatactgacgattatgttatggcgggcatgtgttatgcgaaatatgtacgtagccctatcgcacatggttatgccgtaagtattaatgatgaacaagccagaagtttgccgggcgtactggcgatttttacctgggaagatgtgcctgatattccattcgctacagctgggcatgcctggacacttgacgaaaacaagcgcgataccgccgatcgcgcactgctaactcgccatgttcgtcatcatggtgacgccgttgccatcgtcgtggcccgcgatgaactcacggcagaaaaagcggcgcaattggtcagcattgagtggcaagaattacccgttatcaccacgccagaagcggcgctggcagaagacgctgcaccaatccataacggtggcaatttactgaaacaaagcacgatgtcgacgggtaatgtccaacaaacaatcgatgccgccgactaccaggtacaggggcactatcagacccccgttattcaacattgtcacatggaaagcgtaacatcgctggcgtggatggaggatgactcgcgaattaccatcgtttccagcacccagatcccgcacattgttcgccgcgtggttggtcaggcgctggatattccctggtcatgcgtacgagtcatcaaaccatttgtcggtggcggttttggtaataaacaggatgtactggaagagccaatggcggcattcctgaccagcaagcttggcggcattccggtgaaagtttcccttagccgtgaagagtgtttcctcgcaacccgtacccgccacgcttttaccattgacgggcaaatgggcgtgaaccgcgacggaacattgaaaggttatagtctggatgttctgtctaacaccggcgcttatgcatctcacgggcactccatcgcttctgcgggggggaataaagtcgcttacctttatcctcgttgtgcctacgcttacagttcaaagacctgctataccaacctcccctcggctggtgcgatgcgtggttatggcgcgccacaagtcgtatttgccgttgagtctatgcttgatgacgccgcgacagcgttaggtattgatcctgttgaaattcgtttacgcaacgccgcccgcgaaggagatgctaatccgctcacgggcaaacgtatttacagcgcagggttgccggagtgtcttgaaaaaggccggaaaatctttgaatgggaaaaacgccgtgcagaatgccagaaccagcaaggcaatttgcgccgcggcgttggcgtcgcctgttttagctacacctctaacacctggcctgtcggcgtagaaatagcaggcgcgcgccttctgatgaatcaggatggaaccatcaacgtgcaaagcggcgcgacggaaatcggtcagggtgccgacaccgtcttctcgcaaatggtggcagaaaccgtgggggttccggtcagcgacgttcgcgttatttcaactcaagataccgacgttacgccgttcgatcccggcgcatttgcctcacgccagagctatgttgccgcgcctgcgctgcgcagtgcggcactattattaaaagagaaaatcatcgctcacgccgcagtcatgctacatcagtcagcgatgaatctgaccctgataaaaggccatatcgtgctggttgaacgaccggaagagccgttaatgtcgttaaaagatttggcgatggacgctttctaccaccctgaacgcggcgggcagctctctgctgaaagctccatcaaaaccaccactaacccaccggcgtttggctgtacctttgttgatctgacggtcgatattgcgctgtgcaaagtcaccatcaaccgcatcctcaacgttcatgattcagggcatattcttaatccactgctggcagaaggtcaggtacacggcggaatgggaatgggcattggctgggcgctatttgaagagatgatcatcgatgctaaaagcggcgtggtccgtaaccccaatctgctggattacaaaatgccgaccatgccggatctgccacaactggaaagcgcgttcgtcgaaatcaatgagccgcaatccgcatacggacataagtcactgggtgagccaccaataattcctgttgccgctgctattcgtaacgcggtgaagatggctaccggtgttgcaatcaatacactgccgctgacgccaaaacggttatatgaagagttccatctggcaggattgatttgaggataacatcatgtttgattttgcttcttaccatcgcgcagcaacccttgccgatgccatcaacctgctggctgacaacccgcaggccaaactgctcgccggtggcactgacgtactgattcagctccaccatcacaatgaccgttatcgccatattgttgatattcataatctggcggagctgcggggaattacgctggcggaagatggctcgctacgtatcggctctgcaacgacatttacccagctaatagaagatcctataactcaacgtcatctcccggcgttatgtgctgcggccacgtccattgctggaccgcagatccgtaacgtcgctacctacggtggaaatatttgcaacggtgccaccagcgcagattctgccacgccaacgctaatttatgacgcgaaactggagatccactccccgcgcggtgttcgtttcgtcccgattaatggctttcacaccgggccgggcaaagtgtctcttgagcatgacgaaatcctcgtcgcctttcattttccgccacagccgaaagaacacgcgggcagcgcgcattttaaatatgccatgcgcgacgcaatggatatttcaacgattggctgcgccgcacattgccgactggataacggcaatttcagcgaattacgcctggcatttggtgttgccgcgccaacgccgattcgctgccaacatgccgaacagactgcacaaaatgcgccattaaacctgcaaacgctggaagctatcagcgaatctgtcctgcaagatgtcgccccgcgttcttcatggcgggccagtaaagagtttcgtctgcatctcatccagacgatgaccaaaaaagtgattagcgaagccgtcgccgcggcggggggaaaattgcaatgaatcacagcgaaacaattaccatcgaatgcaccattaacgggatgccttttcagcttcacgccgcaccaggcacgccgctctcggaattactccgcgaacaaggactgctaagtgtcaaacaagggtgctgcgtgggtgaatgtggtgcctgtacggtgttggtcgacggcacagcaatagacagttgcttataccttgccgcctgggctgaaggaaaagagatccgcacgctggaaggtgaagcgaaaggcggaaaactttctcatgttcagcaggcttatgcgaaatccggcgcagtgcagtgcgggttttgtacgcctggcctgattatggctaccacggcaatgctggcgaaaccacgcgagaagccattaaccattacggaaattcgtcgcggactggcgggaaatctttgtcgctgcacggggtatcagatgattgtaaatacagttctggattgcgagaaaacgaagtaaaaggatatccggcctgaattcaggccggattcactgaggttatgtgtttaacaactcatatttcttaatcttgcgatagagcgtagcaatgccgatgcccagttcatcagcaacttgcttcttgctgttatgacgtgaaagcgcctcgcggatcatttgcttttccatctcctccagcgccgtgccgcccgcatcatcgagtgacaggtgcgcctcactgacctctgttacatcactttgctccgttgtgccattattcagcagatttggcggcaatagcgtgctgtcgataacttcacctgaaggaaccacgttaaccagatattccatcaaattgcttaactcgcgcaggtttccgggccaacgatgcttacgcaatatttcgacgacatcgggagcaatgccaggataaaccgatcccagacgacgggtatgcagatgtaaaaagtaatgcaccaatagttcaatatcttcctgacgttcacgcagcggtggcagagttatcgggataacattaagtcggtagaagagatcttcgcggaatttaccttcggcaatgaactgggccaaattctgattagttgcagaaatgatgcgaatgtcgacttgtattgggctactggcaccaatcggcagaatttcacgtgcctcaatagcgcgcagtaatttagcctgcaacattaatggcatatcacctatttcatcgagaaacagcgtgcccgtattcgccgcctgaatcaaccctgttttaccgttggcagaagcgccagtaaatgcacctttaacataaccgaacagttcgctctccagaagctgctccggaatcgcggcacagttgatagcaataaagggtttattccgtcttccgctcaacttatggattgcacgggcgacgacttctttacccgtgccgctttcaccaaccaccataacgctggatgggctgggtgcaatacggctaatgagtcgttttaattgccgcataacacggcactcgccaaccaattgttcaatatgcggttcatcaggtgcatttgctacagaaaaactggtatgcgattggtgaaacgccattaaaaataattgtcggccctgaatgttatgcaattgaccaatgattaattcacttttatcgtcccatgaaacaatatgctgcatatgtccatgggtaaaattactctcaaatgttaatggtctgaaacggataggtttcccaataatattattttgcacaacaccaagtgtttttaaggcagtctgattaacaaactgaacccgattttcatcatctacaactaatacgccctgatccatattatcgatcatggtcgcaaatattttactgatgttatctcctggcccctgatcctccagaagtttcgaaacaaaaatggtggatatatggcgaacataatcagaaaattcgcgtaaattatcactgatatgctcttgttgctcgtgggtaacggcaatcaaacttatcaccccaacacaacgatcctgtaaaatgacaggcgtacccagaaatgctttttcgcggcaattttctttactatcgcaaccttcgcaaaggggatcgaagcgagactgtgtcacaactttttcagttttcgtttccaggacgtggcggagcaggcgtgagttgccgctcaactggcgaccaagaaacttcccatacgcgcccgttccggcaacgcgacacaagttttcatcaacgatctcaacctcaagctgcaaaacgctggcaagcattctggcaaaacgctgaattgtcggttgaatttgcatcaatactgactgcgtagtagcaagctccatagctttaccttccagacttacttaaaagtcgatcattgaagacgttgatggttcacagatcatgatgatattaactcaggcgaaattggctttgataaaaacataagatttttatcattttctaatgaaattatggaagagatatcacatttctatatcaatatgagaattacggcggtgagtttatcaaactgaagagagatagcctgcccctttatcttatttctgatacttagcagcaaataaataacgcgataaaaaaagccaaacgttttcgtattttacaaacaaccagaagctggcatcaatttgtgatcaaccccacacattatccgtcaaattagtcttttgcagccgcgcggataattctggcacacttattgttagtcccaggtatagctgtgaaaacaccaatcactttggcaagtcacagtgaaataaaccactttgcctgtcattccactaccgggactttatgatgaaaactgttaatgagctgattaaggatatcaattcgctgacctctcaccttcacgagaaagattttttgttaacgtgggaacagacgccagatgaactgaaacaagtactggacgttgccgcagcattaaaagcactgcgtgctgaaaacatctcaaccaaagtctttaatagtggattaggtatttccgtattccgcgacaactccacccgtacccgcttctcttatgcttccgcgcttaacctgctcggccttgcacaacaagatctcgacgaaggcaaatcacaaatcgctcacggcgaaaccgtgcgtgaaaccgccaatatgatctccttctgcgccgacgctattggtattcgcgacgatatgtatctgggcgcaggcaacgcctatatgcgtgaagttggcgctgcacttgatgacggttacaagcagggtgtactgccacagcgtccggctttagtgaacctgcaatgcgatattgaccacccgactcagtcaatggctgacctcgcgtggttacgtgaacactttggttcactggaaaacctgaaaggtaaaaaaatcgccatgacctgggcctactctccaagctatggcaaaccgctctctgtaccacaaggcatcatcggtctgatgactcgcttcggtatggatgtcaccctggcccatccggaaggctacgacctgatcccggatgtggttgaagtggcgaaaaacaatgctaaagcctccggtggtagcttccgtcaggtcaccagcatggaagaagccttcaaagacgcagacatcgtttatccgaagtcatgggcaccttacaaagtgatggaagagcgtactgaattgctgcgtgcgaacgatcacgaaggcttaaaagcactggaaaaacagtgtctggcacagaacgcgcaacacaaagactggcattgtactgaagagatgatggaactgacccgtgatggcgaagccctgtacatgcactgcctgccagctgatatcagcggcgtatcctgtaaagaaggtgaagtgactgaaggcgtattcgaaaaataccgtatcgctacctacaaagaagccagctggaagccttatatcatcgccgcgatgatcctgtcccgtaaatacgccaaaccaggtgcactgctcgagcaactgctgaaagaagcgcaagaacgcgtgaaataacccctcgggccgatcagctggtcggccctctatttccagaggccaaaaggataggatatgtccgttttctcattgaagattgatatcgccgataacaaatttttcaacggcgaaacatcaccgctcttttcgcaaagccaggccaaactggcgcgccagttccaccagaaaatagctggttatcgcccaacaccgctttgtgcgctggacgatctcgcaaacctttttggtgtgaagaaaattctcgtcaaagacgaatcaaaacgattcggtctgaacgccttcaaaatgcttggcggtgcgtacgccatcgctcaattattgtgtgaaaaatatcatcttgatatcgaaacgctgtcatttgagcacctgaaaaatgccatcggcgaaaaaatgactttcgcgaccaccaccgacggcaaccacgggcgcggtgtggcgtgggcagcacagcaactcggacagaatgcggtgatttacatgccgaaaggttctgctcaggaacgcgttgacgccattctgaacctcggtgccgagtgcatcgtcacggatatgaactatgacgataccgttcgcctgaccatgcaacacgcgcagcagcacggctgggaagtggtacaggacacggcatgggaaggttacaccaaaatcccaacctggatcatgcaaggctacgcaaccctggcagatgaagccgtcgagcaaatgcgtgaaatgggcgtaaccccgacgcacgttctgctgcaagccggtgtcggagcaatggccggtggtgtgctgggttatctggtcgacgtctatagcccgcaaaatctgcacagcattattgttgaacctgacaaagctgactgtatttatcgctccggcgtcaaaggcgacatcgtcaacgttggcggtgatatggccaccatcatggcaggcctggcctgtggcgaacctaacccgctgggctgggaaatcctacgtaactgcgccacccaattcatctcctgccaggacagcgttgccgcattaggtatgcgcgtgctgggtaatccgtacggcaacgacccgcgcatcatctccggtgaatccggcgctgtcggtttgggcgttctcgcagcggttcattatcacccgcaacgtcaaagcctgatggaaaaactggcgctgaacaaagatgccgtggtgctggttatcagcactgaaggcgacaccgacgtgaagcactaccgcgaagttgtctgggaaggcaaacacgctgtagcaccttaatcaccctattggaactgctccctgcaaaacggggagtaaaaaatctggagaaaaataatggctaagaatattccattcaaactgattcttgaaaaagcaaaagattaccaggcggatatgactcgcttcctgcgcgacatggttgctattcccagtgaaagctgcgacgagaaacgcgtagtacatcgtattaaagaagagatggaaaaagtcggcttcgataaagttgaaatcgacccgatgggcaacgttctcggttatatcggccacggcccgcgtctggtggcaatggacgctcatatcgataccgtcggcattggcaacatcaaaaactgggacttcgatccgtacgaaggcatggaaactgatgaactgattggtggtcgcggtacttccgaccaggaaggtggcatggcctctatggtttatgccggtaaaatcattaaagacctcggtctggaagatgaatataccctgctggttaccggtacggtgcaggaagaagactgcgacggtctgtgctggcagtacattattgaacaatccggcattcgcccggaatttgtggtcagtaccgaaccaaccgactgccaggtataccgtggtcagcgcggtcgtatggaaattcgtattgatgttcagggtgttagctgccacggttctgcaccagaacgcggtgataacgccattttcaaaatgggtccgattcttggcgaattacaagaactctcccaacgtctgggttatgacgaattcctcggcaaaggcaccctcaccgtttctgaaatcttcttcacatccccaagccgttgcgctgtagcagacagctgcgcagtttcaatcgaccgtcgtctgacctggggcgaaacctgggaaggcgcgctggacgaaatccgcgccctgcctgcagtacagaaagctaacgcggttgtttctatgtacaactacgaccgtccgtcctggactggcctggtttacccaaccgaatgctacttcccgacctggaaagtggaagaagatcacttcaccgttaaagcactggtgaatgcctacgaagggctgtttggcaaagcgccggttgttgataagtggaccttctcaactaacggcgtatctatcatgggccgtcacggcattccggtgatcggctttggcccgggtaaagaacctgaagcgcatgcacctaacgaaaaaacctggaaatctcacctggtgacctgtgccgcgatgtacgctgcaatcccgttaagctggctggcaacagagtaattactcttcacttattcccctccggttcgccggagggtttttggagtttgctatgcgcgtattgatcaaaaacggcactgtcgttaacgcagatggacaagccaaacaggatttgctgattgaaagcgggattgttcgccagttgggcaacaatatttcgccgcagctcccgtatgaagaaattgatgccactggctgttacgttttccctggcggcgtggatgtccatacgcatttcaatattgatgtcggcatcgcgcgcagttgtgatgatttttttaccggtacccgcgcagctgcgtgtggcggtacaacaaccattattgaccatatgggatttggcccaaacggctgtcggttacgccatcaactggaggtttatcgtggttatgccgcccataaagcggtcatcgattacagctttcacggtgtgatccagcacattaatcacgcaatcctcgacgaaatcccgatgatagtcgaggaaggactgagcagttttaaactctatttaacctatcaatacaaactcaacgatgacgaggttttgcaggcattacgccgcttgcatgaatccggcgcgctgaccaccgtgcacccggaaaatgatgcggctatcgccagcaagcgggcggaatttatcgccgcagggttaaccgcgccgcgctatcatgccttgagtcgccctctggaatgcgaagcggaagccatcgcccgcatgattaacctggcacaaattgccggtaacgccccgctctatatcgtgcacctgtctaacggcttaggtctggattatctgcgtcttgcccgtgcgaatcaccagccagtctgggttgaaacctgcccacaatatctcctgttggacgaacgcagttacgatacagaagatggcatgaagttcattcttagcccaccgctgcgtaacgtacgcgagcaggacaaactgtggtgtggcatcagcgatggtgcgattgacgtggtggcaaccgatcactgcaccttctcgatggctcaacgcctgcaaatttctaaaggcgatttcagtcgctgcccaaatggcttacccggtgtggaaaaccgcatgcagttactgttttccagtggcgtgatgacgggacgtataacaccggaacgctttgttgaattaaccagcgcaatgcccgccaggttgtttggcctgtggccgcaaaaaggattattagcgcccggttccgacggcgacgtggtgattatcgacccacgtcagagccaacaaattcagcatcgccatctccacgacaacgccgactactcgccatgggagggttttacctgtcagggcgcgattgtcagaaccttatcccgtggtgaaacgattttctgtgacggcacctttacaggcaaagccgggcgaggtcgtttcctgcgacgcaaaccgtttgtccctcccgtgctctaaccactgccagggatctatacacaatcaagaatgatgagtgaggaaaaatgagtaagaaaattgttctcgccctgggcgggaatgcgctgggcgatgacctggccgggcaaatgaaagcggtaaaaattacttctcaggcaattgttgatttaattgcccagggacatgaagttatcgtcactcatggtaacgggccgcaggtgggcatgattaaccaggcctttgaagctgccgcaaaaactgaagcgcactcgccaatgctgccgatgtctgtctgtgttgcattaagccagggttatattggttacgatctacaaaacgctttaagagaagaactgctttctcggggcattaataaacctgtagcaacgctggttactcaggtcgaagtcgacgctaacgatccggcattcctcaacccgaccaagccgatcggttcgttctttaccgagcaagaagcagagcaactgacaaaacagggttacactctgaaagaagatgctggtcgcggctatcgccgtgttgttgcctcgccaaaaccggttgatatcattgaaaaagaaacggttaaagctctggtagatgcaggtcaggtggtgatcaccgttggcggtggtggtatccctgttattcgtgaaggtaaccatctgcgtggtgccagcgcggttatcgataaagactgggccagcgcccgtttagcagaaatgattgatgccgatatgctgatcattctgactgcggtagaaaaagtggccattaacttcggtaaagagaatgaacagtggctcgatcgcctgtcattaagtgatgctgaacgctttatcgaagaaggtcattttgcgaaaggttctatgctgcctaaagtggaagctgccgcctcgtttgctcgctctcgcgcaggtcgtgaagcactgattaccgtattgagcaaagcgaaagaagggattgaaggcaaaacaggaacggtgatttgtcagtaatttaaaggccgggtgggtaataccatccggccaaagattgtcaagtaagtgcgctttgttgatgccggatgcggcgcgagcgccttatccgtcctacaaaacatcgcaaattcaatagattgcaatgcacttgtaggcctgataagcgtagcgcatcaggcaatttggcgtttgtcatcagtctcaggccgggtgggtaataccatccggccattttcatttaagccacttccagcacttcttttgtcgctttcacgccctgatgcatcaacatcattaacgcctcaagtacgccgccgccaatcgcccgggctttatcagaaacgctggtgaaatcagcggtttcaccacgaggatcgatatcaccaattttaaaaccaccaaccactgccaggccgtcgttcaacaagccacgcaccatccccgtcaacggtgctttaatttcatgctcaccaatccaggcaatcacatcgccctctttcaccagatcgcctaatttcacgttggatcgcataatgcctgcagcaggagcacggatcacccgtcgggtggtatgccccataatattgccaggaacaccggtattctcctgcgcacaaccagagtaaatcacctgaccgagccagtgcccgcgatttgtttcaattaccgcatgacaatccttcccagcagtaaagcccggcccaagcgcgattgttactggtgccatatctgcccgcgttcccaaattctgtttcgccagaatagcgtccaccacgcaaagcggtttcagttcatcaagcaatgaacaggcgggatctaccatcacaggaatgaatccgcgttcggtaagtttcatcgcttccgcagagctggttgccaggcgagcagtgacgccttcgaccgtcatttcgccatcgaacacggcctgggcaaacgccacggtacaacgaatcactgtcggtttttccacttccagcatgatcactttaaaacccgcatgatacagacgtagcgccacaccactggcgatatctcccgcaccgcgaatcaccaccagctggtgtccggaaggatgagaaggtttcatcatcagcccacccggcgcgttatttttcacctgtaatatttctgccagcacgctgatggcgatctcctgcggcgtttccgcacctatgttgtaaccaacgggcgcatgtaaacgggcaatatgttcttcagccacgcctttctcacgcaattgacgcaggaaaagctgaaccttgcgacgacttgccagcaaccccaaccatgcaatgggctgttcaatgagtttgtcgagggcttcacgatcctgattattcgtggcaatcaggacaaaattatcagggcgaatatccagtgcttccactgccgcaccaaacgactcagcatggagaagcgtggttgatggtgggaatagttcaggattgaggctttcgcgataaatatcagcaacggcaatatcaaatcctaatagcgccgcactctgggctatcgcccggttgacatgccccgcgccaatcaacaccagacgtggacgcataccatggacgctgataaatactgacattgcacctccacaatctgacccgacagcatccgcaccgttacgagccatacgtccatggaataatcgcggcttacgttcctgcaatgcctgaagcgactcttcaatcaccttccgctcaaccattccgccaccaattgtaccgacgatagaaccatcggcgcgcactaacatttgtgcagaatggcggggagtcgagcctcggctatcaacaatttgcgccatagcaaacggacaattttgctcttcgagttttgcagcctctgtgaaaatattcataccaacctcaatggatatcctttcagtaacccggaatacccgggccgctaattcacaaatctgcgcgcgattgcaggatgttcttgtatatcgcccagccagattgcctctacgtcgtgttgttgcagcggttgaaggagctcgctttgtgcaatcgcattctcacattgagaaaaacggttaatgaaccagactcgccgacaaccttgcggtacgtttttaaacgccccctgagggtggcgaaccagcgcaacgagatcgctcagttgcaaggttgcatcaggtgttaacccggtaatatcagcaaactgcgaccagcgatggacattttctgtgctcactttcgcgcccaaagtatgtcctcccatcacagcaatcacgcagcaactgcttttgggtatgcaaggttcgtgctcatcaggcgcttttaacggcattccacgcgagccatctgcttcaatgagaattacgtcacactctggtcgttgcaccagtgcatcaatcgcttctggcgtaaatccctgcacttttccctggttcgctttccagctgtgaaaacaaaatgaaatgggggatgtaagagacgcatgaggaagcatggcgggatcacgacagaaaaccacgggccagtgagacgttggcataaacatatgtgtcgtcgtcgtgattaacacacgcctgccgctagcctggagcagttctgccagccaaaaaagcaagctggttttccccccagcaccaacaacagaaatcacagtgggacgtttctgcgcacctaaatcaatgactaatgccgatgggtcaactatacttttcacgagtctttatgacctctctgggataaattatccccaacttaatccatcaggaagtaacgcaattatcaggcgttattagcccctataaataatggaaccactatgtcagccatcgactgtataattaccgctgccggattatcatcaagaatggggcaatggaaaatgatgttaccctgggaacagggaacaattcttgatacaagtatcaaaaatgcgttgcagttttgtagccgaattattttagtcaccggctatcgtggtaatgaactgcacgaacgttatgcgaaccagagcaatatcactattattcacaacccagattatgcgcagggtttactaacatccgtcaaggccgcagtacccgcagtgcaaacagaacattgttttctcacccacggtgacatgccaaccctcaccatcgatatttttagaaaaatctggtcgttacgaaatgatggcgcaatactgccactccataatggcatccccggccatccgattttagtgtcaaaaccatgcctgatgcaggcaatccaacgacccaatgtcaccaatatgcgtcaggcactccttatgggagatcattattccgtcgaaatagaaaatgcagaaataattttagatattgatactccggacgactttattacagcgaaggaaaggtatactgaaatttagaaaacgtagttaaacgattgcgttcaaatatttaatccttccggcactcattatcataatgataaggaatcactgattttgagaaaagagaaaaattgataaatgggctggcaataataattttcaggagtgattttaattctcatttagcacctgtgagttcattcacaaaaagcccttaagtttcgagccgcctcacatttttttatatttcccgccaaacctggcaagagtggtgcgattgttgctctatccccctaaaccaccggatttctcaacaccggtcactcaatgatatctgtataagctaaggagagggttatgggggatattatgcgtcccattccgtttgaggaacttttgacgcgcatatttgatgaataccaacaacaacgctcaatctttggtattcccgagcaacagttttactcacctgtaaaaggtaaaactgttagcgtcttcggtgaaacctgtgccactcccgtcggccctgccgctggcccgcacacgcagctcgcgcaaaatattgtcacttcctggctgactggcggacgcttcatcgaactaaaaaccgtccaaattcttgaccgcctggagctggaaaagccctgtatcgatgccgaagacgagtgctttaacaccgaatggtctaccgagtttaccctgcttaaagcctgggatgaatacctcaaagcctggtttgccctgcaccttctcgaagcgatgttccagccttctgattccggtaaatcgttcatctttaatatgagcgtcggttacaacctcgaaggtattaagcaaccgccgatgcaacagttcatcgacaatatgatggacgcatctgaccatccgaaattcgctcaatatcgcgatacgctgaataaattactccaggatgacgcatttttagctcgccacggattgcaggaaaaacgcgaaagcttgcaagccttacccgctcgcatccccaccagtatggtgcatggcgtcaccctctccaccatgcacggctgtcctccgcatgaaatcgaagccatttgccgctacatgctggaagaaaaagggctcaacacctttgtgaaacttaacccgaccttactggggtacgcgcgtgttcgtgagatcctcgatgtctgcggtttcggttacataggcttaaaagaagagtcatttgatcacgacctcaagctgacgcaagcactggaaatgctggaacgcctgatggcactggcaaaagaaaaatcactcggctttggcgtaaaactgactaacactctcggcaccatcaacaataaaggcgcactgcctggtgaagagatgtatatgtcaggccgtgcgctgttcccgctctccatcaatgttgcagcagttctctctcgcgcctttgacggcaaactgcccatttcttattccggtggtgccagtcagctgactatccgcgatatttttgatacaggtattcgccctattactatggcaaccgacctgctgaaacctggcggctatctgcgcttaagtgcctgcatgcgcgagctggaaggctccgacgcctggggacttgaccatgttgacgtcgaacgactgaacagactggcagcagatgcgttaaccatggaatacacccagaaacactggaagccagaagagcgtattgaagtggcagaagacctgccgctgaccgactgctacgttgccccctgtgttactgcctgcgctatcaagcaagatattccggaatacatccgtctgcttggcgaacaccgctatgccgacgcgctggaactcatctaccaacgcaacgctctgcccgccattaccggtcatatttgcgatcaccagtgccaatacaactgtacccgcctggattacgacagtgcgctgaatatccgcgaactgaaaaaagtcgcgctggaaaaaggttgggatgaatataagcaacgctggcacaaaccagccggttctggttcacgccatccggttgccgtgattggtgcaggtccggcgggtctggcagcaggttacttccttgccagagcgggccatccggttacgctgtttgaacgcgaagccaatgcgggcggcgtggtgaaaaatatcattcctcagttccgtattcctgcagagttaattcagcacgatatcgattttgttgccgctcacggcgtgaaatttgagtatggctgctcacccgatttaaccattgagcagttaaaaaatcagggcttccactatgttctgattgccaccggcactgataaaaatagcggtgtgaaactggcgggcgacaaccaaaatgtctggaaatcactccccttcctgcgtgaatacaacaagggtacagcgctcaagctgggcaaacatgtggtcgttgtcggggcgggtaacaccgcaatggactgcgctcgtgcggcgttacgcgttccaggcgtagaaaaagcaacgatcgtttaccgtcgttcactacaagagatgcccgcatggcgcgaagagtatgaagaagcgttgcacgacggcgtagagttccgtttcctgaataatccggaacgtttcgatgctgatggcaccttaaccttgcgcgttatgtcgcttggcgaaccggatgagaaaggtcgtcgtcgtccggttgaaaccaatgaaacagtaacactgcttgtagacagcctgatcaccgccattggtgaacagcaggatactgaagccctgaatgcgatgggcgtgccgctggacaaaaacggctggccagacgtcgaccataatggcgaaactcgtctgactgacgtctttatgatcggcgacgtacagcgcggaccatcctccattgtcgctgctgtcggaaccgcgcgtcgggcgaccgatgccatccttagtcgggaaaatatccgttcccaccagaacgataaatactggaacaacgtcaatccagcggaaatctatcaacgtaaaggcgatatctctatcacgctggtgaacagtgacgatcgtgacgcgtttgtcgcccaggaagccgctcgctgcctcgaatgtaactacgtttgcagcaagtgtgtggatgtctgcccgaaccgcgccaacgtctccattgcggtcccaggcttccagaaccgtttccagacgctgcacctcgacgcttactgtaacgaatgcggcaactgcgctcagttctgtccgtggaacggtaaaccgtacaaagacaaaatcaccgtcttcagcctggcgcaagactttgataacagcagcaacccaggcttccttgtggaagattgccgggtacgagtacgtctgaataaccaaagctgggtgttaaacatcgacagcaaaggtcagtttaacaacgtaccaccggagctgaacgatatgtgccgcatcatcagccatgtccaccagcatcatcattatctgctgggccgcgtggaggtgtaatcatgttgattctgaagaatgtcactgcggtacagctacacccggcaaaagtgcaggaaggcgttgatatcgccatcgaaaacgatgtgattgtcgctatcggcgatgccctgacgcaacgctaccccgacgccagcttcaaagagatgcatggccggattgtgatgccagggattgtctgctcgcacaaccatttttactcggggctttcccgcggaattatggcaaacatcgccccttgcccggatttcatctcaacgctgaaaaatctctggtggcggctcgatcgcgcccttgatgaagagtcgctctattacagcggactgatttgttccctggaagcgattaagagcggatgtacatcggttatcgatcaccatgcctctccggcgtatatcggcgggtcgctctccacattgcgcgacgcatttttaaaagttggcctgcgcgcgatgacctgttttgaaactactgaccgtaacaacggcatcaaagagttgcaggaaggtgtagaagaaaacatccgtttcgcccgtttgattgatgaggcgaagaaagcgacaagcgagccgtatctggtggaagcacatatcggtgctcacgcgccgtttaccgtgccggatgccggtctggagatgctgcgtgaagccgtgaaagccacaggccgtggtttgcatattcacgctgcggaagacctttacgacgtttcctacagtcaccactggtacggcaaagacctgctggcacgactggcgcaattcgatctcatcgacagcaaaacgctggtcgctcatgggctgtacttgtcgaaagatgacatcaccctactcaatcagcgcgatgcgttcctggtgcataacgcccgttcaaacatgaacaaccatgtcggctacaaccatcaccttagcgacatccgcaatctggcgttgggaacggacggcattggttcggacatgtttgaagagatgaaatttgccttctttaaacatcgcgatgcgggtggtccgctgtggcctgacagttttgccaaagccctgactaacggtaacgaactgatgagccgcaactttggcgcgaaatttgggcttctggaagccggttacaaagctgatttaaccatttgcgattacaactcgccgacgccgctgctggcagacaatatcgccgggcatatcgctttcggtatgggctcaggcagcgttcacagcgtgatggtcaatggtgtgatggtctatgaagaccgtcagtttaacttcgattgcgattccatttatgcacaagccagaaaagccgctgccagtatgtggcgtcggatggatgcgctggcataaatgacagatgccctcttcccgcagggaagagggttaaataaggaaagaagatgattgaacaatttttcaggcccgactctgtcgaacaggcgctggaactgaagcgccgctaccaggatgaagccgtctggttcgccgggggcagcaaactcaatgctacaccaacccgtaccgataaaaagattgccatttccttacaggatctggaactggactgggttgactgggataacggtgcactgcggattggcgcaatgtctcgcttgcagccactgcgtgatgcgcgatttattcctgcagcgctgcgtgaagccctcggttttgtttactcacgccatgttcgtaatcagtcgaccattggtggtgaaatcgccgcccgccaggaagagtcggtgctgcttcccgtcctgttggcactggatgctgaactggtttttggcaacggcgaaacgctgtcaatcgaggactacctggcctgcccatgcgatcgcctgctaaccgaaattatcattaaagatccgtatcgcacctgtgcgacccgcaaaattagccgttctcaggcaggtttaaccgtcgtgacggcagccgttgcaatgacagaccacgacggtatgcgaattgcgctggatggcgtcgccagtaaagcactgcgtctgcatgatgtcgaaaaacaaaatctggaaggcaatgcacttgaacaggctgtcgccaacgccattttcccgcaggaagatttgcggggcagcgtggcctataaacgctatatcacgggagttctggtagccgacctgtatgccgactgccaacaggctggggaggaagccgtatgatcatccactttactttaaatggcgcgcctcaggagctaaccgttaatccaggcgaaaacgtgcaaaagctgttgtttaacatgggaatgcactctgtacgcaacagtgatgatggtttcgggtttgccggttctgacgcaataatctttaacggtaatatcgttaacgcgtccttgcttattgccgcacagttagagaaggcagatattcgtaccgcagaatctctgggcaaatggaacgagttaagtctggttcaacaggcaatggttgatgttggcgtggtgcagtctggttataacgatccagctgcagctctgattatcaccgatcttctcgatcgcatcgccgcacctacccgcgaagagatcgacgacgcgctttctggtttgttcagccgcgatgctggctggcagcaatactatcaggtcattgaactggcggttgcacgtaaaaataatccgcaggccaccattgatatcgctccgactttccgtgacgacctagaagtcattggtaagcattatcctaaaactgatgccgcgaaaatggtgcaggcgaaaccctgctatgttgaagaccgcgtaacggctgacgcctgcgtcattaaaatgttacgtagcccacacgctcacgcactgattactcatctggatgtcagcaaagctgaagccttaccgggcgtcgttcacgttattactcacctgaattgcccggatatctactataccccgggtggtcagagcgcaccggaaccgtcaccgcttgaccgccgtatgttcggcaagaaaatgcgtcacgtcggcgatcgtgttgctgcggtcgtcgcagaaagtgaagaaattgcgctcgaagcactgaagctcatcgacgttgaatatgaagtgcttaagccggtaatgtcgatcgacgaagcaatggcggaagatgcgcctgtcgtgcacgatgaaccggtggtgtatgttgctggtgcgccagatactctggaagacgataacagccatgcagcccagcgcggcgagcatatgatcatcaacttcccgatcggttctcgccctcgcaaaaatatcgccgccagtattcatggtcatattggcgatatggacaaaggctttgccgatgccgatgtgatcattgagcgaacctataactcaacgcaagcgcagcagtgcccgactgaaacacatatctgctttactcgtatggacggcgatcgtctggttatccacgcctccacccaggtaccatggcacttacgccgccaggtcgcgcgcctcgtgggcatgaaacagcataaagttcatgtcattaaagagcgagttggcggcggttttggttccaaacaggacatcctgctggaagaagtgtgcgcctgggcaacctgcgtgaccgggcgtccggtactgttccgctacacccgtgaagaagagtttattgctaacacctctcgtcacgtcgcgaaagtcaccgtcaaactgggagcgaaaaaagatggtcgcctgacggcagtgaagatggatttccgcgccaacactggcccttacggcaaccactcactcaccgtaccgtgtaacggaccggcgctgtcgctgccgttatatccgtgcgataacgtcgatttccaggtcaccacctactacagcaacatttgcccaaatggtgcttatcagggttatggcgcaccgaaaggtaacttcgctatcaccatggcattagcggaactggctgaacagttacagatcgaccaactggaaattatcgaacgtaaccgggtacacgaagggcaagagctgaaaattctcggtgcaatcggtgaaggtaaagcgccgacctccgttccttccgccgccagctgtgcactggaagagatcctgcgtcagggtcgcgagatgatccaatggtcgtcaccgaaaccgcaaaatggtgactggcacatcggtcgcggcgtcgccattatcatgcagaaatcgggtatcccggatatcgatcaggctaactgcatgatcaaactggaatcggacggcacctttatcgttcattctggcggtgcggatattggtactggtctggatactgtagtgacgaaactggcagcagaagtgctgcactgcccaccgcaggacgtgcatgttatctccggtgataccgatcatgcgttgtttgataaaggcgcatatgcctcgtccggtacttgcttctcgggtaacgcggcgcgtttggcagcggaaaatctacgggagaaaattctgttccacggcgcgcaaatgttgggtgagccagtggcagatgttcaactggcaacgccgggcgtcgtgcgcggcaagaaaggcgaagttagtttcggggatattgcccataaaggcgaaaccggcaccggctttggttcactggtgggaactggcagttatatcacgcctgatttcgccttcccgtatggcgcaaacttcgctgaagttgccgtcaacacgcgtacgggtgaaatccgcctggataaattctacgccttgctggactgcggtacaccggtcaatccagagttagcgttgggacaaatctacggtgccaccctgcgtgctatcggccacagtatgagcgaagagatcatttatgacgccgaaggtcacccgttaacgcgtgatttacgcagttacggcgcaccgaaaattggtgacattccgcgtgatttccgcgctgtgctggtgccgagcgacgataaagtcggcccgttcggggcgaaatcgatctcggaaatcggtgtaaatggcgcagctccggcgattgctaccgcaattcacgatgcatgcggcatctggttacgcgaatggcatttcacaccggagaaaatactcactgcgctggaaaaaatataaataataaatggccgcttcggcggcctgtttctctgtttgaacgatgactaaatagtgactgcgaaaatgagataagccgttctcaaggcgtcctgcgccccaaattcgtgggaatttattttactaattcagatgatcaaatttactttaaaaggagtgaagggatgtctgatataaaccatgcaggttctgaccttatatttgaactggaggatcgccctccctttcatcaggctctcgttggtgccattacccatctgttggcaattttcgttccgatggtaacccccgcgttaatcgtgggtgcggccttacagctttccgctgaaacaactgcctatcttgtttctatggcgatgatcgcctctggtattggtacctggttacaagtaaaccgctacggcatcgtcggttctggcctactctcaattcagtcagtcaatttttcatttgttacggtcatgattgcgctgggcagcagcatgaaaagcgacggttttcacgaagagttaatcatgtcgtcgcttctcggcgtctccttcgttggcgcatttctggttgtcggatcttcatttatcttgccctatttacgtcgggttattacgcctaccgtcagcggtattgtggtactgatgatcggcttaagcctgattaaagtcggcattatcgattttggtggaggatttgcagccaaaagcagcggtacgttcggcaattacgaacatctcggcgttggtttattggttttaattgtggtgatcggctttaactgctgtcgcagtccgttgctacgcatgggagggatcgccattgggctatgtgtcggctatatcgcatcgttatgcctgggcatggtggatttcagcagtatgcgcaatttgccgttaatcaccatcccgcatccgttcaaatacggctttagttttagcttccatcagttcctggtggttggcacgatttatctgcttagcgtgctggaagcagtcggcgatatcaccgccacggcaatggtttcccgccgccccattcagggggaagagtatcagtcccggctgaaaggcggcgtgctggcagatggtctggtttctgttatcgcctccgctgtcggttcattaccattaaccacgtttgcgcaaaataatggggttattcagatgactggcgtcgcttcacgttatgtcgggcgaaccatcgcggtaatgctggttatcctcggcttatttccgatgattggcggcttcttcacgaccattccctcggcagttctgggaggcgcaatgacgttgatgttttccatgattgccatcgcagggattcgcatcatcatcaccaacggtttaaagcgccgtgaaacacttattgtcgccacttctttaggtttagggcttggcgtctcctacgatcccgaaatttttaaaatattgccagcctctatttatgtattagttgaaaaccctatttgtgctggcgggttaactgcgattttattaaatattatcctccctggtggctaccgacaggaaaacgttctgcctggtattacctcagcggaagagatggattaacagtaaaggagtcaatgatgtcaggagaacacacgttaaaagcggtacgaggcagttttattgatgtcacccgtacgatcgataacccggaagagattgcctctgcgctgcggtttattgaggatggtttattactcattaaacagggaaaagtggaatggtttggcgaatgggaaaacggaaagcatcaaattcctgacaccattcgcgtgcgcgactatcgcggcaaactgatagtaccgggctttgtcgatacacatatccattatccgcaaagtgaaatggtgggggcctatggtgagcaattgctggagtggttgaataaacacaccttccctactgaacgtcgttatgaggatttagagtacgcccgcgaaatgtcggcgttcttcatcaagcagcttttacgtaacggaaccaccacggcgctggtgtttggcactgttcatccgcaatctgttgatgcgctgtttgaagccgccagtcatatcaatatgcgtatgattgccggtaaggtgatgatggaccgcaacgcaccggattatctgctcgacactgccgaaagcagctatcaccaaagcaaagaactgatcgaacgctggcacaaaaatggtcgtctgctatatgcgattacgccacgcttcgccccgacctcatctcctgaacagatggcgatggcgcaacgcctgaaagaagaatatccggatacgtgggtacatacccatctctgtgaaaacaaagatgaaattgcctgggtgaaatcgctttatcctgaccatgatggttatctggatgtttaccatcagtacggcctgaccggtaaaaactgtgtctttgctcactgcgtccatctcgaagaaaaagagtgggatcgtctcagcgaaaccaaatccagcattgctttctgtccgacctccaacctttacctcggcagcggcttattcaacttgaaaaaagcatggcagaagaaagttaaagtgggcatgggaacggatatcggtgccggaaccactttcaacatgctgcaaacgctgaacgaagcctacaaagtattgcaattacaaggctatcgcctctcggcatatgaagcgttttacctggccacgctcggcggagcgaaatctctgggccttgacgatttgattggcaactttttacctggcaaagaggctgatttcgtggtgatggaacccaccgccactccgctacagcagctgcgctatgacaactctgtttctttagtcgacaaattgttcgtgatgatgacgttgggcgatgaccgttcgatctaccgcacctacgttgatggtcgtctggtgtacgaacgcaactaataataaaactttaacatcctcgtgaggacatcattatgtctggagacatcctacaaacaccggacgcaccaaagccacagggcgcgctggataattattttaaaattaccgctcgtggcagtaccgttcgtcaggaagtactggctggcttaacgacctttctggccatggtttattccgttatcgtcgttccgggaatgctgggcaaagcaggttttcctcccgcagctgtgtttgttgccacctgtctggtcgcgggcttcggctcgttgctgatgggattatgggctaatttgccaatggcgattggttgcgcgatttccttgacggcgtttaccgcattcagtctggtactcgggcaacaaattagcgttcctgtcgcactgggcgcggtatttctgatgggcgtcatcttcaccgccatttccgtaaccggtgtgcgtacctggatcttacgtaatttgccgatgggtatcgctcacggtacaggtatcggtatcgggctgtttctgctgctgattgctgctaacggtgtgggtatggttatcaaaaacccgattgaaggcttgccagtggcgctcggtgcgtttacctccttcccggtgatgatgagcttgctggggctggcggtcatcttcggcctggagaagtgtcgcgtacccggcgggatcttgttggtgattattgcaatttcgatcatcggcttaatctttgacccagcggtgaaataccacggtctggtggcgatgccaagcctgactggcgaagatggtaagtctctgattttcagcctcgatattatgggtgcactccagccaactgtacttccgagtgtactggcattggtgatgaccgcagtgttcgacgctactggcaccatccgtgccgtcgccggtcaggcgaatttgttggataaagacaaccagatcatcaacggcggcaaagccctgaccagtgactcagtaagttcaatattctccggcctggtgggcgcagcgcccgcagcggtttatatcgaatcagcggcaggaaccgccgccgggggtaaaacaggtttaaccgcaaccgtagtgggggcgttattcctgttaattctgtttttatcaccgctgtcatttttgatccctggttacgccactgcacccgctctgatgtacgtaggtttgctgatgttaagtaacgtctcgaagctggatttcaatgattttattgacgctatggctggcctggtgtgtgccgtgttcatcgttctgacttgtaatatcgttaccggtattatgctgggctttgtgacactggtcgtaggccgcgtctttgcacgcgaatggcaaaagctgaatattggtacggtgatcattactgccgcactggtcgcattttacgcgggtggttgggcaatctaatagattctccgcgcctttcagcgcggagatttctttcagagaggattctcaccgctgacaacaatacgctgctggcggactcgcctgagttctctttcagtaagcaactgcagcgcctgtgttgggcaagattcaacgcaggctggcccctcttcccgctgttcacagagatcgcatttcacaatttgttgtcgggtatcccccggcaacgactgaatggtgatcattccaaacgggcacgcactgacgcaactctgacagccaatacaacgggcagaattggtctgcaccacctgctcgcccatcgtcagcgcccccacggggcaagcgccaacacaaggggcgttttcacactgatggcacatcaccggcgcactgatgctgtccagtcgctgtaccttcagccggggtaaaaagacatcggcattcaactcctgttctgaagggtgagcgaccacacaggctacttcacaagtacggcagccaatacagtcagccggattaacgataattaacgatttcatcacgatgccttcgtatcaaacagagttaacatatcgcgcgccgcctgccttcctgcggccattgcagtgacaaccagatccgcgccatgaactgcatcaccaccagcaaagacttttttcagatgcgtctgggtaggtaaatacccgacgtcaccggtttgaatcaggccccatttatcgagtttaattccgctgccctgcaaccacggcatggcatgcgcctggaaaccaaaggccataatcagaacatcggcgggcaattcaaactctgaacccgctaccggacgaggacgacggcgaccatccggccccggctcacccatggcggtacgaatcaggcccaccgcagttaaacgcccatcttcgtcacaagcgatatattgcggttgaacattgaactgaaactcgacaccttcctcgcgcgcattaaccacctctttgcgcgagcccggcatactgacttcatcacgacgatacgcgcaggtcacgctggcggcattgaggcggatggaagtccgcaaacaatccattgtcgtatcgccaccgcccaataccacgactcgcttaccttccacgtccgtcagcggatactcttcagactccggcaatcccatgagctggcgggtatgggcagtcaggaacggtagagcctgaatgacaccgggcgcatcttcatgcggcagatctgctcgcatcatcccgtaagtccccacgccgatgaaaactgcatcatattcagaagttaaatcgctaaaggtaatatcgcggccaatttcacagttaagatgaaagtcgattcccattgcggtgaatatctctcgccgctggcttaataccgttttatcgagtttgaaaggaggaatgccaaaagtcagcataccgccaatttctggatggcgatcaaagacatcgacctgaactcctgcgcgcgccagaatatcagcacaccctaaccctgcaggcccagcgccaatcaccgccactttttcgctacggggaacaactttgctgacatcgggacgccagcccatcgccagcgcggtatcggtgatgtagcgttccagattaccgatagagactgcgcccgagtgatctttcaaagtacatgcgccttcacaaagacggtcctgtggacataccctgccgcaaatttctggtaaggaactggtctggtggcaaagttctgccgcttcaataatctttccttcctgtaccagacggatgtaatccggaatagcgttatgcagcgggcaatgccagttgcagttagctttttcggcacaataaacacagcggtcactctcataagtcgcttgttgtggatccagcccgcaatatatttcgccaaagtgggttttccgttcactcgctgaaattttatctgcgcctttacgcgagttaacggggagcaacgctgcactgcgagatggctgagcgtctgatgacgcttttcctgctgccgttttgcgctggcgggccacctttatctgctgcaaccctttatcgtccatcagtcgtaacgcctgtgttgggcaaacttcaatacaggcttgcgtgccggaactgcgctggttacaaaggtcgcatttctgcgcaatcgtatcgaccatctcaacgacgccaaaggggcaagcgattgcgcatcttttacaaccaatacatttttgctcgtccagttgtacgctatcggactggaaagtcagagcattaaccggacaagccgtaacgcaaggggcattgttgcagtgatggcaggccaccggattcgcagcctggcctttccctacaacgtggatacgcggtcgaaagtcactgtgactcagcggccagttttcttgattgtgtgccaccgcacaggcaatttcacaagcatgacagcctatacattccgcagcttcagcagcaataaacttattcatttgcatccctttcatttaatgagttatgtcttctcaaatttcgcgatgcaataaacgggcatatattaggtagcatgaccgttttaattataattttgcgactgagttcaaattattgcccctcaatctatgccgctttcattatttcaacattgccgatcaaaagagcgctatccagataaaaacgattaaatgcgagagtgcgacatgccagaatgattaatgaaatatcaatatgagaaaattacagataattccattgtcaggttctcttctcattttcgtggtttaaccacgattatgtgattgcctccgcaattcctgtctctaactccccttcctcgcaaaaactggcactccacgagcatgtgtttagacagtttcattaacgtaaacggttgctttttactctggcgggcgaaaggagaaacactgatgagcgccatagattcccaacttccctcatcttctgggcaagaccgcccaactgatgaggttgaccgcatattatcaccaggaaagctgatcatactcggtctgcaacacgtccttgtcatgtacgcaggtgcagtcgctgttcctcttatgattggtgaccgactgggcctctcaaaagaagctattgcgatgctcattagctcggatctcttttgctgcgggatcgtcacattattgcaatgtatcggtatcggccgctttatggggatccgcctgccggtgattatgtcggtgacctttgctgctgtaacaccaatgatagccattgggatgaacccggatatcggcctgctggggatatttggtgccactatcgccgcgggttttatcaccacattattagcgccacttatcggtcgcttgatgcctttattcccgccactggttaccggtgtggttattacttctatcgggcttagcatcattcaggtgggtattgactgggccgccggaggtaaagggaatccgcaatatggtaatcccgtttatttaggtatctcctttgccgtcttaatttttatcttgctcattactcgctatgcgaaaggatttatgtccaacgtcgccgtattactggggattgtatttggctttttactttcgtggatgatgaatgaagtcaatttatccgggctacatgatgcttcatggtttgcgattgttacgccgatgtcgtttggtatgccgattttcgatcccgtttccattctgaccatgactgccgtgttaatcatcgtgtttatcgagtcaatggggatgttcctggcactg
